United States Patent Application Publication US 2007/0072175 A1 - sequence listing, part 18

SEQ ID NO: 48077 - DNA, 225 bp, Homo Sapiens
aataaagatctctttgtccttacctatggagctctggttgcccagctgtgtaaggattatgagaaggatgaagatgtgaaccaatatttagataaaatgggttacggcattggaacgcggcttgtggaagactttttggctcgatcctgcgtgggaagatgccatagttattcagaaattatagacataattgcccaggtaactatgtttttatctctgtcaata

SEQ ID NO: 48078 - DNA, 748 bp, Homo Sapiens
atcctcgtgggccctgaccttctctctgagagccgggcagaggctccggagccatgcaggccgaaggccggggcacagggggttcgacgggcgatgctgatggcccaggaggccctggcattcctgatggcccagggggcaatgctggcggcccaggagaggcgggtgccacgggcggcagaggtccccggggcgcaggggcagcaagggcctcggggccgggaggaggcgccccgcggggtccgcatggcggcgcggcttcagggctgaatggatgctgcagatgcggggccagggggccggagagccgcctgcttgagttctacctcgccatgcctttcgcgacacccatggaagcagagctggcccgcaggagcctggcccaggatgccccaccgcttcccgtgccaggggtgcttctgaaggagttcactgtgtccggcaacatactgactatccgactgactgctgcagaccaccgccaactgcagctctccatcagctcctgtctccagcagctttccctgttgatgtggatcacgcagtgctttctgcccgtgtttttggctcagcctccctcagggcagaggcgctaagcccagcctggcgccccttcctaggtcatgcctcctcccctagggaatggtcccagcacgagtggccagttcattgtgggggcctgattgtttgtcgctggaggaggacggcttacatgtttgtttctgtagaaaataaaactgagctacga

SEQ ID NO: 48079 - DNA, 3767 bp, Homo Sapiens
ctggaaggaagtttaaatacagaaagagcaaagtattatctaactataacaatgccacattttactgtgactaaggtagaggacccagaggagggggcagcggcttcgatctctcaagagcctagtttagcagacataaaagcccggattcaggattcagatgaaccagacctgagtcagaactccatcacaggggaacacagccaactgttagacgacggacataagaaagctcgaaatgcttatctcaataattccaattatgaagaaggagatgaatattttgataaaaatttggcactctttgaggaagaaatggacaccagaccgaaggtgtcttccctcctcaaccgcatggccaattacactaatctgactcaaggagcaaaggaacatgaagaggcagaaaacatcactgaagggaaaaagaagcccaccaagaccccccaaatgggtaccttcatgggtgtctacctcccatgtctacaaaatatttttggagtgatcctttttttacgccttacatgggtggtgggcacagctggagttcttcaggcttttgcaattgtccttatctgctgctgctgtacaatgttgactgctatctccatgagtgccattgccactaatggagtggtgccagctgggggctcatactttatgatttcccgggcactgggcccagagtttggtggggctgttggcctctgcttttatcttggtaccacatttgcagcagccatgtacatccttggtgccattgaaatctttctggtctatatcgtcccccgagctgccatctttcacagtgatgacgcactcaaggaatcagcagccatgctaaataacatgcgtgtctacggcacagctttcttggtccttatggtattagtggtatttatcggcgtacgctatgtgaacaagtttgcctcacttttcctggcctgtgtcattgtgtccatcttggccatctatgctggagccatcaagtcttcttttgctcctccacacttcccggtctgcatgctgggtaaccgcaccctttcatcaagacacattgacgtttgctctaagaccaaggaaattaacaacatgacagtcccatcaaagttatggggattcttctgtaactcgagtcaatttttcaatgccacctgtgatgaatactttgttcacaataacgtcacttcaatccagggcattcctggattggctagtggtataattacagagaatctttggagtaattacctacccaagggagagatcatcgaaaagccttcagccaaatcttctgatgtcttaggcagcttaaaccatgaatatgttcttgttgacatcaccacctccttcacgcttctggtgggaatcttctttccctctgttacaggtatcatggctggatcaaacagatctggagatctgaaagatgctcagaagtctattccgattggtactatccttgccatcctgaccacctcctttgtttatttaagcaatgttgtcctttttggtgcatgtattgaaggggttgttctcagagacaagttcggtgatgctgtgaaaggtaatttggtggtaggcaccttatcttggccatccccatgggtgattgttattggctccttcttttcaacatgtggggctggacttcagagcctcacaggtgcaccgaggctgctacaagctattgccaaggataacatcataccgtttctgagggtttttggccacagcaaagccaatggggaacctacctgggctttacttctaactgctgccattgcagagcttggaatactcattgcctccctggatcttgtggccccaattctttccatgttttttctcatgtgttacctctttgtaaacttggcatgtgccttgcaaacattacttcgaacacccaactggagaccccgattccgctactaccattgggccctttctttcatgggaatgagtatctgtctggctctgatgttcatttcttcctggtattatgccattgtagccatggtaatagctggtatgatctacaagtacattgaataccaaggagctgagaaagaatggggtgatggtatccgtgggctgtccctcagtgcagcccggtttgctttgcttcgattggaggaaggacctccacacactaaaaactggaggcctcagttgcttgtattactgaaactagatgaagacttacatgtcaagcatcctcgcctcctcacctttgcctcacagctcaaagcaggaaaaggtctcactattgtgggctctgtcatcgtggggaacttcctagagaactacggtgaagctttagctgctgagcagaccataaagcacctaatggaggcagagaaggtaaaaggattctgccagctggtggtggccgccaagctgagagagggcatttcccacctcatccagtcatgtggccttgggggcatgaagcacaacacggtggtgatgggctggcctaatggctggcgtcaaagcgaagatgcccgcgcttggaagacttttattggcacagttcgagtgacaactgctgcccatcttgcactgctggtggctaaaaacatctccttctttcccagcaatgtggagcaattttctgagggcaacattgatgtgtggtggattgtgcatgatggggggatgcttatgctactaccattcctactgaaacagcacaaggtgtggcgaaagtgcagcatacggatcttcacagtagcccaattagaagacaacagtatccaaatgaagaaggacctagccaccttcctatatcacttacgcattgaggcggaggtagaagtggtggagatgcatgacagtgatatatcagcatatacttacgagcgcactttgatgatggaacaaaggtcccagatgctccggcacatgcggctatccaaaacagagcgagacagagaggcacaattggtgaaagaccgaaactcaatgctacgattgaccagcattggctctgatgaggacgaagagacagaaacctatcaggagaaggtgcacatgacttggacaaaagacaagtacatggcatcccggggacaaaaagcgaagtcaatggaaggattccaggacctgcttaacatgcgtccggaccagtccaatgtgaggcggatgcatacagcagtgaaactcaacgaggttatagttaacaagtcccatgaagcaaagctggttttattgaatatgccagggccaccccgaaaccctgagggtgatgaaaactacatggagttcctagaggtgcttaccgagggactagagcgagtcctacttgtccggggtggtggcagtgaagtgatcaccatttattcataacctactctgaatgaccgtgcttgacctgttttcttaaaaggcctacgtcctccatggaagtgccagctcattactaccactcccactcaactagaagcctgtgttctgtacacatcatactgaactcttgatgagctgagcctcaagtacctgtgtaaaagagctcccatctgatctgcagtcattacagaaaaagcaaatattccctcaacatcagaacaatgctcaagtctttcaagccacgtctgagcagtcaaaggcaaattagaattaacaagctgagccaataaatgaattggtaaaagggatgctagaaattcaactgaagaaaaaaagcaagtcaagtacgtattcagcattaaagatgaatctcagaagtcatggttcaatgttgacactgtgaggataacaactag

SEQ ID NO: 48080 - DNA, 681 bp, Homo Sapiens
ggcaagatggcagcggcgctgcgcgtgcgttgttgagtgttcgggacgccggcctgcaggcgccatggtcttcctcaccgcgcagctctggctgcggaatcgcgtcaccgaccgctactttcggatccaggaggtgctgaagcacgccaggcacttccggggaaggaaaaatcgctgctacaggttggcggtcagaaccgtgattcgagcctttgtgaaatgcaccaaagcccgatacctgaagaaaaagaacatgaggaccctctggattaatcgaattacagctgctagccaggaacatggactgaagtatccagcgctcattgggaatttagttaagtgccaggtggagctcaacaggaaagtcctagcggatctggccatctacgagccaaagactttcaaatctttggctgccttggccagtaggaggcgacacgaaggatttgctgctgccttgggggatgggaaggaacctgaaggcattttttccagagtggtgcagtaccactgaggactgttgctgtattgattaggaaaagagacagagtaatttgcagtttgtttgatttatacttttgtttatctacaacccaataacagacatgagggatggccctgtctctctgggacagagcctcacagatgatgtccatgttttgtgtgaatgaaactcaaaca

SEQ ID NO: 48081 - DNA, 171 bp, Homo Sapiens
atggagaccctccatacatggggttcaaaggtcctggggtattcctggatcttcaggacatctgcctaccctcaggtttcccaggcctcgggtggggaggcatcagatccctggccaacctgctatccaccccagggtttagacctctcttcccgtgagggaacagagtag

SEQ ID NO: 48082 - DNA, 2684 bp, Homo Sapiens
atggactggcaagaccacaggtcgaccacggagctgcgcaaggaaaagtcccgggatgcggcccgcagccggcgcagccaggagaccgaggtgctgtaccagctggctcacacgctgcccttcgcccgcggcgtcagcgcccacctggacaaggcctctatcatgcgcctcaccatcagctacctgcgcatgcaccgcctctgcgccgcaggggagtggaaccaggtgggagcagggggagaaccactggatgcctgctacctgaaggccctggagggcttcgtcatggtgctcaccgccgagggagacatggcttacctgtcggagaatgtcagcaaacacctgggcctcagtcagctggagctcattggacacagcatctttgatttcatccacccctgtgaccaagaggagcttcaggacgccctgaccccccagcagaccctgtccaggaggaaggtggaggcccccacggagcggtgcttctccttgcgcatgaagagtacactcaccagccgcgggcgcaccctcaacctcaaggcggccacctggaaggtgctgaactgctctggacatatgagggcctacaagccacctgcgcagacttctccagctgggagccctgactcagagcccccgctgcagtgcctggtgctcatctgcgaagccatcccccacccaggcagcctggagcccccactgggccgaggggccttcctcagccgccacagcctggacatgaagttcacctactgtgacgacaggattgcagaagtggctggctatagtcccgatgacctgatcggctgttccgcctacgagtacatccacgcgctggactccgatgcggtcagcaagagcatccacaccttgctgagcaagggccaggcagtaacagggcagtatcgcttcctggcccggagtggtggctacctgtggacccagacccaggccacagtggtgtcagggggacggggcccccagtcggagagtatcgtctgtgtccattttttaatcagccaggtggaagagaccggagtggtgctgtccctggagcaaacggagcaacactctcgcagacccattcagcggggcgccccctctcagaaggacacccctaaccctggggacagccttgacacccctggcccccggatccttgccttcctgcacccgccttccctgagcgaggctgccctggccgctgacccccgccgtttctgcagccctgacctccgtcgcctcctgggacccatcctggatggggcttcagtagcagccactcccagcaccccgctggccacacggcacccccaaagtcctctttcggctgatctcccagatgaactacctgtgggcaccgagaatgtgcacagactcttcacctccgggaaagacactgaggcagtggagacagatttagatatagctcaggatgctgatgctctggatttggagatgctggccccctacatctccatggatgatgacttccagctcaacgccagcgagcagctacccagggcctaccacagacctctgggggctgtcccccggccccgtgctcggagcttccatggcctgtcacctccagcccttgagccctccctgctaccccgctgggggagtgacccccggctgagctgctccagcccttccagaggggacccctcagcatcctctcccatggctggggctcggaagaggaccctggcccagagctcagaggacgaggacgagggagtggagctgctgggagtgagacctcccaaaaggtcccccagcccagaacacgaaaactttctgctctttcctctcagcctgagtttccttctgacaggaggaccagccccagggagcctgcaggaccccagcaccccactcctgaacctgaatgagcccctgggcctgggcccctcactgctctctccgtactcagacgaggacactacccagcccgggggccccttccagccaagggcaggctcagcccaggctgactgagccggctcctctccccatctgccttctcctcccccagaaaggacctcaaccacactccacgccggcagccaacgcacaggatgggggcgccaggagaggggcccctctctcctctatgtaccccctgcccacctcgggcctacctcagccctcacccctctgcctgctcccaatctgggggctctctggggtggtctcagctcagtgacctctgggaggtggtccctggccccctcctccttctctcaggatttctcttggggttctcaatacttggttacctcattatccctttctctgcctctcttggctttattttggggaatcaggggtgaggagggttgggggggtcatatctgtgtttccaggttctggggagaacaatgatccacgggtcaacgtgatcacatttccttctatccttcttgtattattatttttatttttgtcaatttcatgatatggtttttaatcatgatgaattgcctggggtctgtaagaatgtgggactctgatcttccccctcttcaggtgtcagtgcggagaggctctgggccagacctcacccccagtgacttccgattgaggccaaagaccccaagctgcccgccagctctgactgccccttgcgctctgggcttcctgccgcccccagctttgcctggacactgacttcattc

SEQ ID NO: 48083 - DNA, 522 bp, Homo Sapiens
atgatgggctggagctgccttgtgacaggagcaggagggtttccgggtcagaggattgtcaacctcttggtgaaggagaaggagctaaaggagatcagggccttggacaaggccttcagatcaggattgagggagaaattttctaagctccagaacaagaccaagatgacagtgctagaaggagacattctggatcagtcatgcctgaagagagcctgccaggacatctcggtagtcatccacaccgcctctatcattgacatcttcggtgtcactcacagagagtctatcatgaacttcaacgtgaaaggtacccaacagctgttggaggcctgtgtccaagctagtgtgctagtcttcatccataccagcagcatacaggtagcctggcccaactcctacaaagagattttccagaatcgacacaaacaagagcatctggaaaacacatggtctgctccatatccatacagcaaaaacttgctgagaaggctgtgctggtggctaatgtgtggactctga

SEQ ID NO: 48084 - DNA, 2555 bp, Homo Sapiens
atggacttcagcagaaatctttatgatattggggaacaactggacagtgaagatctggcctccctcaagttcctgagcctggactacattccgcaaaggaagcaagaacccatcaaggatgccttgatgttattccagagactccaggaaaagagaatgttggaggaaagcaatctgtccttcctgaaggagctgctcttccgaattaatagactggatttgctgattacctacctaaacactagaaaggaggagatggaaagggaacttcagacaccaggcagggctcaaatttctgcctacagggtcatgctctatcagatttcagaagaagtgagcagatcagaattgaggtcttttaagtttcttttgcaagaggaaatctccaaatgcaaactggatgatgacatgaacctgctggatattttcatagagatggagaagagggtcatcctgggagaaggaaagttggacatcctgaaaagagtctgtgcccaaatcaacaagagcctgctgaagataatcaacgactatgaagaattcagcaaagagagaagcagcagccttgaaggaagtcctgatgaattttcaaatggggaggagttgtgtggggtaatgacaatctcggactctccaagagaacaggatagtgaatcacagactttggacaaagtttaccaaatgaaaagcaaacctcggggatactgtctgatcatcaacaatcacaattttgcaaaagcacgggagaaagtgcccaaacttcacagcattagggacaggaatggaacacacttggatgcaggggctttgaccacgacctttgaagagcttcattttgagatcaagccccacgatgactgcacagtagagcaaatctatgagattttgaaaatctaccaactcatggaccacagtaacatggactgcttcatctgctgtatcctctcccatggagacaagggcatcatctatggcactgatggacaggaggcccccatctatgagctgacatctcagttcactggtttgaagtgcccttcccttgctggaaaacccaaagtgttttttattcaggcttgtcagggggataactaccagaaaggtatacctgttgagactgattcagaggagcaaccctatttagaaatggatttatcatcacctcaaacgagatatatcccggatgaggctgactttctgctggggatggccactgtgaataactgtgtttcctaccgaaaccctgcagagggaacctggtacatccagtcactttgccagagcctgagagagcgatgtcctcgaggcgatgatattctcaccatcctgactgaagtgaactatgaagtaagcaacaaggatgacaagaaaaacatggggaaacagatgcctcagcctactttcacactaagaaaaaaacttgtcttcccttctgattgatggtgctattttgtttgttttgttttgttttgtttttttgagacagaatctcgctctgtcgcccaggctggagtgcagtggcgtgatctcggctcaccgcaagctccgcctcccgggttcaggccattctcctgcctcagcctcccgagtagctgggactacaggggcccgccaccacacctggctaattttttaaaaatatttttagtagagacagggtttcactgtgttagccagggtggtcttgatctcctgacctcgtgatccacccacctcggcctcccaaagtgctgggattacaggcgtgagccaccgcgcctggccgatggtactatttagatataacactatgtttatttactaattttctagattttctactttattaattgttttgcacttttttataagagctaaagttaaataggatattaacaacaataacactgtctcctttctcttatgcttaaggctttgggaatgtttttagctggtggcaataaataccagacacgtacaaaatccagctatgaatatagagggcttatgattcagattgttatctatcaactataagcccactgttaatattctattaactttaattctctttcaaagctaaattccacactaccacattaaaaaaattagaaagtagccacgtatggtggctcatgtctataatcccagcactttgggaggttgaggtgggaggattgcttgaacccaagaggtcaaggctgcagtgagccatgttcacaccgctgcactcaagcttgggtgacagaacaagaccccgtctcaaaaaaaattttttttttaataaaacaaaatttgtttgaaatcttttaaaaattcaaatgatttttacaagttttaaataagctctccccaaacttgctttatgccttcttattgcttttatgatatatatatgcttggctaactatatttgctttttgctaacaatgctctggggtctttttatgcatttgcatttgctctttcatctctgcttggattattttaaatcattaggaattaagttatctttaaaatttaagtatcttttttcaaaaacattttttaatagaataaaatataatttgatctta

SEQ ID NO: 48085 - DNA, 453 bp, Homo Sapiens
atgtggagctggaagtgcctcctcttctgggctgtgctggtcacagccacactctgcaccgctaggccgtccccgaccttgcctgaacaagcccagccctggggagcccctgtggaagtggagtccttcctggtccaccccggtgacctgctgcagcttcgctgtcggctgcgggacgatgtgcagagcatcaactggctgcgggacggggtgcagctggcggaaagcaaccgcacccgcatcacaggggaggaggtggaggtgcaggactccgtgcccgcagactccggcctctatgcttgcgtaaccagcagcccctcgggcagtgacaccacctacttctccgtcaatgtttcagcttgcccagatctccaggaggctaagtggtgctcggccagcttccactccatcactcccttgccatttggacttggtactcggcttagtgattag

SEQ ID NO: 48086 - DNA, 1645 bp, Homo Sapiens
ttctagtctcgcccagaagatcgttgcgacctaccgcctgtgctcggaacaactgtcctctcagcatcactatgactacggtatgcgcgctgtcaagtctgtgcttactgccgcaggaaacctgaagctcaagtatccagaggagaatgaaagtgtcctgctgctccgggcattgcttgatgtcaatctggccaagttcttagcgcaagatgtccctctgtttcagggaattatatctgatttatttcctggagttgttcttccaaagccagactatgaagtttttctgaaagtgctgaatgataacatcaaaaagatgaaactccagccagtaccttggtttatagggaaaattatccagatctacgaaatgatgctggtgagacatggctatatgattgtaggagaccccatgggcggcaagacctctgcttataaagtgttggctgcagctctcggcgatttacacgcagccaatcagatggaggagtttgctgtggagtacaagatcatcaaccccaaggctatcacgatggggcagctgtatgggtgctttgaccaagtgagccacgagtggatggatggtgtccttgccaatgctttccgggagcaagcgtcttcactctctgatgatcgcaagtggattatatttgatgggccagtggatgctatttggattgaaaatatgaacactgttctggatgacaataaaaagctgtgtctcatgagtggggaaattatccagatgaactccaagatgagcctgatcttcgagcccgccgacctcgagcaagcctctccagccactgtgagcaggtgtgggatgatctacatggagccccatcaactaggctggaagcccctgaaggattcctacatggacaccctgccctccagtctcaccaaggagcacaaagaattgatgaaatcagggcagtagaagaggaggaaatggaattaggtgaaggcctgtcaagtcaacagatctttctctggctccaaggactgtttctcttttccttggtgtggaccgtggctggcaccatcaacgcagacagcagaaagaaatttgatgtgtttttccgcaacctgatcatgggcatggatgataaccacccaaggcccaaaagcgtcaaactcaccaaaaacaacatctttccagaaagaggtaatttagaacctgtttgttatgttctagtataatagttggaattacatgttctaaacacaaccagaatgtgcagacaggtgagccctttacaaaagccacagaaggccaggcacggtggctaataaatatgtaaggaattacagaattaaaatatcatcattggctggttgtggtgtctcacactggtaatcccagcactttgggaggctgaggtgggcagatcacttgaggtcagcagttcaagaccggcctggccaacatggtgaaaccccgtctctattaaaaatacaaacaaaattagctgggtgtggtggcatgcacctataaacccagctattcaggaggctgaggcaggaggattgcttgagtccgggaggtagaggttgcagtgagctgagatcatgccactgtactccagcctgagcaacagagctagactctgtctcaaaaaaaaaaaaaaaaaaaaaaaataga

SEQ ID NO: 48087 - DNA, 612 bp, Homo Sapiens
cctggggtagatcccagccccccgcataggtccttttgctggaaaaggaagagggagtggtgggacgaatctgaggagtcgttggaggaggagccacggaaggtgctcgcccctgagcctgaggagatctgggtggcggagatgctgtgtggcctcaagatgaagctgaagcgacggcgagtgttgctcgtgctccctgagcaccacgaggccttcaacaggctgcttgaggatcctgtcattaaaagattcctggcctgggacaaagatctgagggtgtcggacaagtatctcctggctatggtcatagtgtatttcagccgggccggcctcccctcctggcaataccaacgcattcatttcttcctggctctctacctggccaatgacatggaggaggacgacgaggactccaaacaaaacatcttccacttcctgtatgggaagacccgctctcgcatacccttgctcctcctgttccagaaacttcggttccagttcttctgttccatgagcggcagggcttgggtttccccggaggagttggaggagatccaggcttatgacccagagcactgggtgtgggcacgagatcgcgctcacctttcctag

SEQ ID NO: 48088 - DNA, 867 bp, Homo Sapiens
tttgaaacaaccgacgagagcctgaggagccattttgagcgatggggaatgctcacagactgtgcggtaatgagagatccaaacaccaagcgctccaggggctttgggtttgttacatacgccactgtggaggaggtggatgcagccacgaatgcaaggccacacaaggtggatggaaaagttgtggaaccaaggagaactgtctcaagagaagattatcaaagatcaggtgcccacttaactgtgaaaaagatatttgttggtggcattaaagaaaacactgaaaaacatcagctaagagattattttgaacagcatggaaaaatggaagtgattgaaatcatgactggcagtggcaagaaaaggggctttgcctttgtaacctttgacgaccatgactccatggataagattgtcattccgaaataccatactgtgaatggccacaactgtgaagttaggaaagccctgtcaaagcaagagatggctagtgcttcttccagccaaagaggtcaaagtggaggcggccctggttactctggaggaagcagaggctatggaagtggtggacagggttgtggaaatcaggacagtggctatggcaggagtggcagctatgacagctgtaacaagggaggcagaggcggctttggcagtggtagtggaagcaattttggaggtggtggaagctacaatgattttggcaattacaacaatcagtattcaaattttggacccatgaagggaggaaactttggggcagacgctctggcccctggtgatggaggccaatactttgccaaaccaccaaaccacagtggctatggcggttccagtagcagcagtagctatggcagtggcagaaga

SEQ ID NO: 48089 - DNA, 591 bp, Homo Sapiens
atgaatgatgtaaaattaatcaaactatccggttcgcttgggagacgcttcggcgtctttcacagattcgctgttgactcttacccggaagctatccgggcgctatccagtcaggtagatggatttaaagaatacatgcaaagcgagataggatctcgtagcaagtttgcaatatttgtggatggcgttaacgtgggacaccatgaagaggaaaaattcaagtgcgcgaaagagataagaatcgtaccgatccctactggctctaagacaggaggtctattccaggttgtattgggcgcggcaataatggttgcagcattctatactggcggcgcgtctctagctttaatgggaacaatgtcctcgtctctgtttatgatgggcggcgctatggtgctgggcggcgtgatgcagatgatttcaccgcagccgggtggcgcaaactttgaagttcaatcaagcaagaataaaccttcgtacgcgttcggcggtgctgtcaatacgacggcggcgggataccctctcccggtcccgtatggatatcgcgccggaggtggcgcaactttctcagcaggttcttatgccgaggat

SEQ ID NO: 48090 - DNA, 165 bp, Homo Sapiens
atgaggctctcatgtctagtgattattaccattactgcagaactctgtgtgccactgatgctctgtgcccacggagaacaggcacagctgccaagggtgtgtgttgggggcgggcgtctccctgtctggtctccttgtcttggcttccctaggctgcccattccc

SEQ ID NO: 48091 - DNA, 552 bp, Homo Sapiens
atgcgcgagtacaaagtggtggtgctgggctcgggcggggtaggcaaatccgccctgaccgtgcagttcgtgaccggcaccttcatcgagaaatacgaccccaccatcgaggacttctaccgcaaggagatcgaggtggattcgtcgccgtcggtgctggagatcctggacacggcgggcaccgagcagttcgcgtccatgcgggacctgtacatcaagaacggccagggcttcatcctcgtctacagcctcgtcaaccagcagagcttccaggacatcaagcccatgcgggaccagatcatccgcgtgaagcggtatgagaaagtgccagtcatcttggttgggaacaaagtggacctggaaagtgagagagaagtatcgtccagcgaaggcagagcccttgctgaagagtggggctgcccctttatggaaacttccgctaagagtaaaacaatggtggacgaactctttgcagaaattgtgaggcagatgaactatgctgctcagcctgacaaagatgacccatgctgttctgcatgtaacatacaatag

SEQ ID NO: 48092 - DNA, 673 bp, Homo Sapiens
aagatgtagctgtgtagtctccttccatagctgctctaagggggctggcaacatggctcagcaggcttgccccagagccatggcaaagaatggacttgtaatttgcatcctggtgatcaccttactcctggaccagaccaccagccacacatccagattaaaagccaggaagcacagcaaacgtcgagtgagagacaaggatggagatctgaagactcaaattgaaaagctctggacagaagtcaatgccttgaaggaaattcaagccctgcagacagtctgtctccgaggcactaaagttcacaagaaatgctaccttgcttcagaaggtttgaagcatttccatgaggccaatgaagactgcatttccaaaggaggaatcctggttatccccaggaactccgacgaaatcaacgccctccaagactatggtaaaaggagcctgccaggtgtcaatgacttttggctgggcatcaatgacatggtcacggaaggcaagtttgttgacgtcaacggaatcgctatctccttcctcaactgggaccgtgcacagcctaacggtggcaagcgagaaaactgtgtcctgttctcccaatcagctcagggcaagtggagtgatgaggcctgtcgcagcagcaagagatacatatgcgagttcaccatccctcaatag

SEQ ID NO: 48093 - DNA, 2312 bp, Homo Sapiens
ccctgccccgcgccgccaagcggttcccgccctcgcccagcgcccaggtagctgcgaggaaacttttgcagcggctgggtagcagcacgtctcttgctcctcagggccactgccaggcttgccgagtcctgggactgctctcgctccggctgccactctcccgcgctctcctagctccctgcgaagcaggatggccgggaccgtgcgcaccgcgtgcttggtggtggcgatgctgctcagcttggacttcccgggacaggcgcagcccccgccgccgccgccggacgccacctgtcaccaagtccgctccttcttccagagactgcagcccggactcaagtgggtgccagaaactcccgtgccaggatcagatttgcaagtatgtctccctaagggcccaacatgctgctcaagaaagatggaagaaaaataccaactaacagcacgattgaacatggaacagctgcttcagtctgcaagtatggagctcaagttcttaattattcagaatgctgcggttttccaagaggcctttgaaattgttgttcgccatgccaagaactacaccaatgccatgttcaagaacaactacccaagcctgactccacaagcttttgagtttgtgggtgaatttttcacagatgtgtctctctacatcttgggttctgacatcaatgtagatgacatggtcaatgaattgtttgacagcctgtttccagtcatctatacccagctaatgaacccaggcctgcctgattcagccttggacatcaatgagtgcctccgaggagcaagacgtgacctgaaagtatttgggaatttccccaagcttattatgacccaggtttccaagtcactgcaagtcactaggatcttccttcaggctctgaatcttggaattgaagtgatcaacacaactgatcacctgaagttcagtaaggactgtggccgaatgctcaccagaatgtggtactgctcttactgccagggactgatgatggttaaaccctgtggcggttactgcaatgtggtcatgcaaggctgtatggcaggtgtggtggagattgacaagtactggagagaatacattctgtcccttgaagaacttgtgaatggcatgtacagaatctatgacatggagaacgtactgcttggtctcttttcaacaatccatgattctatccagtatgtccagaagaatgcaggaaagctgaccaccactattggcaagttatgtgcccattctcaacaacgccaatatagatctgcttattatcctgaagatctctttattgacaagaaagtattaaaagttgctcatgtagaacatgaagaaaccttatccagccgaagaagggaactaattcagaagttgaagtctttcatcagcttctatagtgctttgcctggctacatctgcagccatagccctgtggcggaaaacgacaccctttgctggaatggacaagaactcgtggagagatacagccaaaaggcagcaaggaatggaatgaaaaaccagttcaatctccatgagctgaaaatgaagggccctgagccagtggtcagtcaaattattgacaaactgaagcacattaaccagctcctgagaaccatgtctatgcccaaaggtagagttctggataaaaacctggatgaggaagggtttgaaagtggagactgcggtgatgatgaagatgagtgcattggaggctctggtgatggaatgataaaagtgaagaatcagctccgcttccttgcagaactggcctatgatctggatgtggatgatgcgcctggaaacagtcagcaggcaactccgaaggacaacgagataagcacctttcacaacctcgggaacgttcattccccgctgaagcttctcaccagcatggccatctcggtggtgtgcttcttcttcctggtgcactgactgcctggtgcccagcacatgtgctgccctacagcaccctgtggtcttcctcgataaagggaaccactttcttatttttttctatttttttttttttgttatcctgtatacctcctccagccatgaagtagaggactaaccatgtgttatgttttcgaaaatcaaatggtatcttttggaggaagatacattttagtggtagcatatagattgtccttttgcaaagaaagaaaaaaaaccatcaagttgtgccaaattattctcctatgtttggctgctagaacatggttaccatgtctttctctctcactccctccctttctatcgttctctctttgcatggatttctttgaaaaaaaataaattgctcaaataaaaa

SEQ ID NO: 48094 - DNA, 1227 bp, Homo Sapiens
ggaggcgtcgaccaaagaaccattgaaaaatttgagaaggaggctgctgagatgggaacgggctcgttcaagtatgcctgggtcttggataaactgaaagctgaatgtgaacatggtatgactattgatatctccctgccaaaatttgagaccagcaagtactacatgactatcattgattccccaggacacagacactttatcaaaaacatgattatagggacatctcaggctgaccgtgctgtcctgattgttgctgctggtgctggtgaatctgaagctggtatctctaagaatgggcacacccatgagcatgcccttctggcttacacactgggtgggaaacaactaattgttgatgttaacaaaatggatcccactgagacaccctacagccagaaaaaatacaaatccttaaagaagtcagcactttcattaagaaaattaactacagcccctggcacagtagtagcatttgtgccagtttctggttggaatggtgacaccatgctggagccaagtgctaacatgccttggttcaagggatggaaagtcactcataaagatgtcaatgccagtggaaccaagttgcttgaggcactggactgcatcctaacaccagcttgtccaaccgacaggccctcgcccttgcctctccaggatgtctacaaaattggtggtgttgctactttgcctattggcggagtggagactggtgttctcaaacctggtagggtgatcacctttgctccagtcagtgttacagaagtaaagtctgttgaaatgcaccatgaagctttgagtgaccttcctcagaacaatgtggccttcaatgtcaagaatgtgtctgtcaaaaatgttcattgtggcaatgttgctggtgacaacaaaaatgatccaccaacggaaacaactggcttcgctgctcaggtgattatcctgaagcatccagtccaaatcagtgctggctattcccctctactggattgccacacagatcacattgcatgcaaatttgctgagctgaaggaaaagattgattgccattctggtaagaagctgaaagatggccctaaattcttgaagtctggtgatgttgccaccaaattcttgaactctggtgatgttgatatggttcttggcaagcccatgtgtgttgaggtcttctcagactatcctcctttgggttgctttgctgttcatgatatgagatggagaattgccatg

SEQ ID NO: 48095 - DNA, 972 bp, Homo Sapiens
atgatgaaagtgaaggccagagtaaatggatttggccatactgggcacctggtcaccacggctgcttttaactctggcaaagtggatatcatcaccatcaatgacctcaactacatggtctaccatggaatcacatggttccagtatgattccacccacagcaagttccactgcaccatcaaggctgaaaatggaaatcccatcaccatcttccaggagggagatcccaccaaaatcacacagggtgacgctggtgctgattatgttatggagtccactggcatcttcactaccatggagaaggctggggctcacttagagggtggagccaaaagggtcattacctctgccccctctgctgatgcccccacgttcgtgatgggcatgagccataagaagtataaaaacctcaagatcatcagcaatgcctcctgcaccaccagctgcctaaccctggccaaggtcatccataataactctggcatcatgaagcgactcagcatcacagtccatgccatcactgctacccagaagactctcggcccctctgggaaactgtggtgtgatggccatggggctctccattacatcatccctgcatctactggtgctgccaaggctgtgggcaaggtcatccccaagccgaacaggaagctcagtggtgtggccttccatgtacccactgccaatgtgtcagtcatggacctgacctgctctctggagaaaccagccaaatatgatgacatcaaggaggtggtgaagcggcatcggagggggccatcgggcatcgtgggccacactgagcaccaggctgtctcctccaactttaacagtgacacccactcttccaccttcaacactggggctggcattgccctcaacggcctctttgtcaggctcgtttccgggtatgacaatgaatttggctacagcaacaaagtgataacctttatgatccacatggcttccaag

SEQ ID NO: 48096 - DNA, 1422 bp, Homo Sapiens
atgcctccctctgggccccgaggaaccctccttctgttgccgctgctgctgctgctcctgcttcgcgccgtgctggctgtccccctggagcgaggggcgcccaacaaggaggagacccctgcgactgagagtcccgacacaggcctgtactaccaccggtacctccaggaggtcatcgatgtactggagacggatgggcatttccgagagaagctgcaggctgccaatgcggaggacatcaagagcgggaagctgagccgagagctggactttgtcagccaccacgtccgcaccaagctggatgagctcaagcgacaggaggtgtcacggctgcggatgctgctcaaggccaagatggacgccgagcaggatcccaatgtacaggtggatcatctgaatctcctgaaacagtttgaacacctggaccctcagaaccagcatacattcgaggcccgcgacctggagctgctgatccagacggccacccgggaccttgcccagtacgacgcagcccatcatgaagagttcaagcgctacgagatgcttaaggaacacgagagacggcgttatctggagtcactgggagaggagcagagaaaggaggcggagaggaagctggaagagcaacagcgccggcaccgcgagcaccctaaagtcaacgtgcctggcagccaagcccagttgaaggaggtgtgggaggagctggatggactggaccccaacaggtttaaccccaagaccttcttcatactgcatgatatcaacagtgatggtgtcctggatgagcaggagctggaggcactcttcaccaaggagctggagaaagtgtacgacccaaagaatgaggaggacgacatgcgggagatggaggaggagcgactgcgcatgcgggagcatgtgatgaagaatgtgagctctgtcactcacccttatctggctccccaggtggacaccaaccaggaccgcctcgtgaccctggaggagttcctcgcatccactcagaggaaggagtttggggacaccggggagggctgggagacagtggagatgcaccctgcctacaccgaggaagagctgaggcgctttgaagaggagctggctgcccgggaggcagagctgaatgccaaggcccagcgcctcagccaggagacagaggctctagggcggtcccagggccgcctggaggcccagaagagagagctgcagcaggctgtgctgcacatggagcagcggaagcagcagcagcagcagcagcaaggccacaaggccccggctgcccaccctgaggggcagctcaagttccacccagacacagacgatgtacctgtcccagctccagccggtgaccagaaggaggtggacacttcagaaaagaaacttctcgagcggctccctgaggttgaggtgccccagcatctgtga

SEQ ID NO: 48097 - DNA, 2391 bp, Homo Sapiens
ggcaccgcagacggcggcggcagcgttttaggcagatgcgcgctgcaggcaactccagcgctgttaaaccaacatcctcccttttcagaaatctacaccaacacctatgcagccgggggcacggtggaaggaggtgtatcgggagtggagctcaacacaggtatggggacagccgttggcctcatggccgcaggggccgcaggagcctcaggggccgcaaggaagaggagctctaccatgggaaccctgcgggactacgctgacgcagacatcaacatggctttcttggacagctacttctcggagaaagcgtatgcttatgcagatgaagatgaaggtcgaccagccaatgactgcttgctcatttatgaccacgagggagtcgggtctcccgtaggctctattggttgttgcagttggattgtggatgacttagatgaaagctgcatggaaactttagatccaaaatttaggactcttgctgagatctgcttaaacacagaaattgaaccatttccttcacaccaggcttgtataccaatcagtactgacctccctttgctcggacctaattactttgttaatgaatcttcaggattgactccctcagaagttgaattccaagaagaaatggcagcatctgaacccgtggtccatggggatattattgtgactgagacttacggtaatgctgatccatgtgtgcaacccactacaattatttttgatcctcagcttgcacccaatgttgtagtaaccgaagcagtaatggcacctgtctatgatattcaagggaatatttgtgtacctgctgagttagcagattacaacaatgtaatctatgctgagagagtactggctagtcctggtgtgcctgacatgagcaatagtagcacgactgagggttgtatgggacctgtgatgagcggcaatattttagtagggccagaaattcaagtgatgcaaatgatgagtccagaccttcccataggccaaaccgttggctccacatcccccatgacatctcgacacagagtaacacgatacagtaacatacattacacccaacagtaagtgctttatggtcagtattctatgtggagaccttgcaccttgtaatcatcaatacatccaccaaaaatatataatgtaccatatatattaatagtcaacaaatactcagatattctaaggtcaatgccattatttgattataccattttgagggtgaatatggctaggcactttagataagcctttttaaaattctttctgattttaaataatgcgtcaaaaaatgtgcagaaaatgtattgcatcccttgatactgtctaacgaatagcacataactcatattgtgaatcctatgggtcttgaggcctgtagaaccaatcttgtaaaccaagatgccttgttcttggaagttacaaaagaagccctgtctacatccaccagccatatttttcgttagggaaatatttatattaaaatttttaattgaaaagttgaatgaaatgtacattctgaaaggaaattgaaaaggaacgtagagtatctgtcaatatctttagatatctgaagtcatttgtctcttcaaaagatttttcaatattatgcgctattaagcaataggagatgcttaatataataagaaaagagtttgccaactgaaagcatggctggaaatggttcatcaaagaaaaatatatatttttattgaactttattgatttatatgattaactgtaaattaatctagaatagcaaaaaaaaatgacaatcctaaagtagaaagagttattggggaaatattagagttttccccacttacagggaattttttccctactgttgccaattatgtcagaaaaatacatgaaatatggcttaaccaatttcattgacctgaatcgtagagctttcaattggcaaccagatattctccaaaagcactctgtagttattcatatattctacaatatttacttagaagcaactaggtgttgggtgctagtcttggctctgtgaatatacaggtaaagaagacagacatggtttctgccttcatagagcttctattcatttctagacttaaaataaaactctgggatatggctttaagttcctaacaacaataattaaccaactacttaagtccattaccaagttgtgtttctctttgcaacactactgtttatgttgaataaataaaatggaaacacattgcttacttttcgtaggcataaagctgacttgagaaaaagaatctctagccaggtaattttacttaattctgtaaaatatgtatacagtagcagcaataatgtgactgagataatgtaaatgaaataaacttattttcaaggcttaatccttttgaaaggaaataa

SEQ ID NO: 48098 - DNA, 411 bp, Homo Sapiens
atgcaaccttgggcgctgccaaccgtgggcgagctctgggtgtgcgggcggcctggcgcggcgctccgatggagtctagttctgtcgcccaggctggagcccagtggtgtgatctcagctcactgcaatctccacctcctggcttcaagcgattcttctgcttcagcctcccgactgtgtcagcgtgttatgatgccgtcccgtaccaacctggctactggaatccccagtagtaaagtgaaatattcaaggctctccagcacagacgatggctacattgaccttcagtttaagaaaacccctcctaagatcccttataaggccatcgcacttgccactgtgctgtttttgattggcgcctttctcattattataggctccctcctgctgtcaggctacatcagcaaaggg

SEQ ID NO: 48099 - DNA, 705 bp, Homo Sapiens
atgaccgtggtgtacggggtcacccgctacggtgggcgcctgcagattgagaagcgcctccgggagctgaacgactttccccaggagttcgtgtgggaggcctcccactacctcgtacgccaggtcttcaggagtctacaggagatgttctcggggacccgggccatccagcactggctgatcgagagcgcccacctcgtctcccacacgggctctgtggtggagtgggtcacccccctgggcgtccccatcatccagccgtatcgcctggagtccaaggtcaagcaatcaggaggtggaattcagagcatcacttacacccacaacagagacatcagccggaagcccaacacacctaagcagaagaacggcttccggcccaacttcatccactcgctggactcctcacacatgatgctcaccaccctgcactgctacaggaagggcctgaccttcgtctctgtgcacgactgttaccggacccatgcagctgatgtctccatcatgaaccaggtgtgccgggagcagtttttgcacagcgagtccatcctgcaggacctgtccaggttcctggtcaggcggttctgctctgagccccagaagatcttggaggccagccagatgaaggagacactgcaggtggtgcccaagccaggggccttcgacctggagctggtgaagcgttccacctacttcttcagctga

SEQ ID NO: 48100 - DNA, 2923 bp, Homo Sapiens
cagataaaactcatcagtgctttgaaacaagcagctctgaaccaaagaaatcatttgattcaagtaaccattggatcttcccaaggcaatggtgaaagaaaagaaaaaagcagacaaaaaaggggagaagtctgcccgctctccctcatctctctctgataatctagacttttccaaacaagatggcaacaccactaggcaagagatgtccccagctggtgtcccattgctgggaatgcagctcaacgaagtgaaacccaaaaaagaccgccaaaacgttcagcagaacgaagatgccacccaatacgaagagtccattctgaccaaactcatagtggaaagctatgaaggggaaaaggttcgtgggctgtatgagggagaaggcttcgcagcctttcaaggcggttgtacctatcgtggtatgttttcagaaggactcatgcatggacaggggacttatatttgggccgatggattaaaatatgagggcgactttgtgaagaatgtcccgatgaaccacggcgtgtacacgtggccggacggcagcatgtatgaaggcgaagtggtcaacggcatgaggaacggattcgggatgttcaagtgcagcacccagcctgtgtcctacatcggccactggtgcaatggcaagcggcacgggaagggctccatttattacaatcaagagggtacgtgttggtacgagggagactgggtacaaaacatcaaaaagggctggggaataagatgttataaatctggaaatatatacgaaggccagtgggaagacaacatgcgccacggggaggggaggatgaggtggctgaccaccaacgaagagtacaccgggcggtgggagaggggcatccagaatggctttggaacacacacatggtttctaaagagaatccgcagttcccagtatcctttgagaaatgaatacataggggagtttgtaaatggatatcgtcacggacgtggcaagttttattatgccagtggagccatgtatgatggagaatgggtttccaataagaaacatggcatgggccgattaactttcaagaacgggcgtgtgtacgaaggcgcattctccaatgaccacatagctgggtttccggatcttgaagttgaattcatcagctgcctggacctgtcttcaggagttgccccaagactgtccaggagcgccgaactgatcagaaagcttgatggcagtgaaagtcattctgtgttgggatcgagcattgagctggatctaaatttgctcctggacatgtaccctgagacagtccaacctgaagaaaagaagcaggtggaatatgccgtcttaagaaatattacagaattaagaagaatttacagcttttacagcagcctgggatgcggccactctctggataatacctttctgatgacaaagcttcacttctggagatttctaaaagattgcaaatttcatcaccacaaactaactcttgctgatatggacaggatattaagtgccaataatgacataccagttgaagaaatccattctccatttacaacaatacttttgagaacatttttgaattacctcctgcatttggcgtaccacatttatcatgaagaattccaaaagagaagcccatccctcttcttgtgttttacaaaactgatgaccgagaacattcgtccaaatgccttccagataaaaggcaatttattccgtgagcaacagcggacgctctactctatgagttacatgaataagtgctgggagatttatctcgcttactgcagacccagtgcagcgcctccccacgagcctacgatgaagatgagacacttcctctggatgctgaaagactttaaaatgataaataaagaattaacagcagctacatttatggaggtcatagcagaggataatcgtttcatatatgatggaattgacagcaactttgaacctgagctggttttcctggaattctttgaagctctcttaagctttgcattcatctgtgttactgaccaaatgactaaatcctatacaaatgttccagctgatgatgtgtctggaaataaacatgaaactatttatacaatactaaatcaggacgcccagaacaagagtcccagcgcggtcatgagccacgaatcggatgctgctcactctgacagtgccaggtcatcttccagcaagttagaactctcgcctgatgttaacaaaataaggaaatcagagcccaagatcaagaagtctgtaagtcatgaaagagtctccaaaatgaattttaaattgactggaaaagggatcacctttttctcatctgagagcaagaaatatgagagacccaaggatgatcgagaggaagagttcaacacgtgggtcaataatatgtacgtcttctttgtgaacacgctctttcatgcgtataaacgtgaagaagctatcaaggagaaaataagggcagacaggttacgtagcacagcacaggcccagcagcggaagatggaagatgacgaactggaagcaaggctgaacatcttcatcttgagagaggaagaggccaagagacatgactatgaggtggacatcacagtgctcaaggagccggcagacgtgtcatcctctcacctcatactggaccctcccaaggaggatgtgaccgtgtccccatccagcaagaccatcaccagcaagaagaagaaaaagtagagagacacgaggacacacacacaggcttaggatggcacgtgctgtaagatttcctgagcattacagttcttagcactgaactcgtcacagtgttttaacataccccttggcccactgcatctcaggtttcctacatggctggattacgggagttcgagaccagcctgggcaacatagtgagacccccccatctctgcaaaattaaaacatcagccgaccgtg

SEQ ID NO: 48101 - DNA, 800 bp, Homo Sapiens
tttttccagtgaaacaaaacgtaagaatctgagtttgtttttcaaagatcactaaattttagttatgattatatcacattttccaaaatgtgtggcagtttttgccctccttgctctgagtgttggtgcactggacacttttattgctgcagtatatgagcatgcggtgatattaccaaacagaacagaaacacctgtttcaaaagaagaagctttgctcctgatgaacaagaacatagatgttttggagaaagcagttaagctggcagcgaagcagggtgcacatatcattgtgaccccagaagatggaatctatggttggatcttcaccagggagagcatttacccctatctagaggatataccagaccctggagtgaactggattccatgtagagacccctggaggaagagtaaaaagatgaatgagcctgtttccaaagagctttgctatcactgtcattcagaatgcaatcaatatggccaatggaaattgtataggacttgaaaaaggaagccctacttctgggaccacattttacgaccacctagctgagtgataaatcactaaaatatagtaagtttgaggaaatgtctattgaattagattcggcaacacaccagtgcaacaaagactcagctgcctggccaaggacaactctatctatgtcgtggctaatattggggacaagaagccatgcaatgccagtgactctcagtgtccccctgatggccgttaccaatacaacactgatgtggtgtttgattctcagggaaaactgttggcacgctaccataag

SEQ ID NO: 48102 - DNA, 240 bp, Homo Sapiens
atgtcgcacaaacaaatttactattcggacaaatacgatgacgaggagtttgagtatcgacatgtcatgctgcccaaggacatagccaagctggtccctaaaacccatctgatgtctgaatctgaatggaggaatcttggcgttcagcagagtcagggatgggtccattatatgatccatgaaccagaacctcacatcttgctgttccggcgcccactacccaagaaaccaaagaaatga

SEQ ID NO: 48103 - DNA, 2133 bp, Homo Sapiens
aagtaaactttttaattccatcacaatatgttctagatctttgacagactgaaagacatagaatgtcaaaaggtgagactctctcatgtggctaaacaccctcctactgcagatacagaactgagcccaagagcattcacatgctggtgagaggtggtggccaggggcaggcagatggttgcaccactctcagggtcagcatcctccccagtgtggcatgggggaggggaggggagggggcacggggcctgggaggctgtagcctaaaggcacgcagcgggcaagagactactgggcggacccctgccagccttcagttccatgagcgtctggtgccaggacgctccttgtgggctctgccctgggagaagtgcccttgcccagtgctccttctcggtgtctgtgacgtgctgtctccagtcctcctcattagcataccttggccgacctttggctcatggaaaaacactttgctcttctcggaacaatttctttttcacaactgagcaaatgactgatgaggtgaccacactcatgaccatactcatctgttggtggtgggtggggggtggactggatgaggacagcattgggcaacactctttctggcctccccactgcagggagccacaattactgtgggaggccagggtagtccagggtttccctttgggccatcagcattccaactgctcctcctacttctggcctctggagaactaaattaccaccatgcacttcccattccacctgtgcctcagcccgagggtcctgctcttcctgcatattcaagctgatctttctagggagtagcctgcactgtgccagcactacccccttgtcacaggcagcacctccctgtgctgggggagcctcagtctgcccttgggctcaggcccctaggctcaggttagctgacattcccaggaaatcctacaacttctcctttcctttcatggctgtaagacacagtccactatcagtctcattgtaaaagacatttctaaagagtgtcctcctttctttcccaacactagcagggacagtaagtgatgtttcctgggagatgctatggtgttatttttgcactacaagggctctgaagactgccaggcttgaaatgaagaacgatgtcacctgcctatcacagccaggtgacaatggacaaggggcttcacctctgagctgttttccagctgcactgggcacattcctcccctcaccctgactcacaaggtgttagcaataatggacacttctctaccttctgccacactctgaacaatgccacacttccatcaaatggattcatcccaaaggtaaagcccatcacttctagagggagaaaggtaatgttttcctaccacttttatttgatctcatttagaaggtacttgaggaatagagaagactgggttttctctgggattatacttaggcatttcttaacgactgggacatgttctgaaaaatctgtcattacacaatttcatcattgtgctatcatagagcatacacacccgaccctagatggcatagcctactccacacctaggctgtacagtatggcctgttgctcaaggctacacacctgtacagcatgttactgtactggatactgtaggcaactgtaacacagtggtatttgtgtatctaaacgtatataaacacagaaaaggtatagtaaaagatggtataatttcatgggaccaccatccgatacaccatccatcaccaacagaaacatggttatgaggcacaggactgtaactgcagcccctgccatgaggtcaatggcagcctggatagggggattggacttcatgtttgcccactcttctggtctcatggaaggcagctctctggagcttatgacaggcaccacatatccctggggggaggcaagagttcaccattagtccaagtctgcagcctcccattctctaggcctgcagccaaattactggacctaaacttctgggagccatgaactgggctctacattgttccaaaggaaaggggctcaaggaatcagtgcagcttagcaattgtcccttagaaagctcacagatcaaaaacctcccctgcgtatcaattctacagccaccagcagcacttcaactgacctttctg

SEQ ID NO: 48104 - DNA, 1405 bp, Homo Sapiens
tgacatgggcagagtttctcttgcccttaaagtcttactttccacttctaaataccttccaagatgttttcctccacaaacacaatatcttccttaaaagatagaccctgcatcagttgttaagctaacacatctttctcctcactacaaatgtatcactattgaatttctctccacaagtgtgaagatggctggagtagaaattctggcattgcttctcatcaccagaaggaaaaattcagagaaacagcccgaccacccaccctgacaaatgcctgaggcccacatgcagcctgcaaaactgcaaacatcactgcccaccacagaccacggaagcaagaagcctgtttcctgttacttgccaccactcagcaatgcccaccccatgtgtatagaggtccagaatgctcaaaattgttcttctgctgctgcaacattggagccttccatcatctcagacacatgcttttataaaccaataacaaaggatcaactttcttctaggtctgaattgaatactgtgaggctaaagtgtcttaactcattgagggggtggaaaatattaaaccaactaagccttacctaattacaatgccctgctgctgctcatctccctttattcgtttgtactcatactcaaaagaggttgtgtttttttcccttcattcaataacgattttccttgattcttagataagtccattccataatgtactccttaactgttctgaatttctttcagagaaaaactggaaaagacattaaatcatgttgaaatatttgactgactttcatctaggaaaaaatataaagttaaatctctacactaaaatataaacaaaataaaaagaaatttcagtaagaccaaaacatttacttttaaaaacctatatcatgttatatgtataactgaggaatgtaatcataattttgatttgtagaactgaagacaatatcaagtaaccctcaaaatgtaaattcaagaaacaaggtagttacgttagcctgcattaaaataaaaatatctgtgtgacaatatatgctgtagagcaaattaaaaaacaagtgaaaaggttgggtaaatatttgcaatacatattgatacggtttggatttgtgtccctgcccaaatcttatggcaaattggaggaggggcctggtgggaggtgattggatcataggagcggatttcccccttgctgttctcatgatagtgagtgagttctcacaatatctgatggattaaaagtgtgtgcacctcccctcttgcactttctctccagtcaccatgtgaagttccttgcttccccttctgccatgattgtaagtttcctgaggcctcccagtcatgcttcttattaagcctgtggaattgtgagtcaattaagccttttttattcataaa

SEQ ID NO: 48105 - DNA, 273 bp, Homo Sapiens
gctaaagcccactttaacaaaaataccgtcactgtgcctggaagttctctctcttcagacactaaaaatgtcagcgtttccctaattctgtcctacgcgatgctgaaggtcatcatcactcacactgccaagcagagctctgtgcagagaaataacctggatgcaagaatcaccaaactaacctactcccaccggccagacataaaatctaagccagctactgggttaacatcaccaaggacggtgggagctttgtcaccgggcaaacggtga

SEQ ID NO: 48106 - DNA, 351 bp, Homo Sapiens
atggacacgttttgctccacactcctgctgctgaccaccccttcctgggtcttgtcccaggtcaccttgaaggagtctggtcctgcgctggtgaaacccacagagaccctcacgctgacctgcactctctctgggttctcactcagcacttctggaatgggtatgagctggatccgtcagcccccagggaaggccctggagtggcttgctcacatttttttgaatgacaaaaaatcctacagcacgtctctgaagaacaggctcatcatctccaaggacacctccaaaagccaggtggtccttaccatgaccaacatggaccctgtggacacagccacgtattactgtgca

SEQ ID NO: 48107 - DNA, 324 bp, Homo Sapiens
atgctgaggagctgcgccgcgcgcctccgcacgctgggggctctgtgcctgccgccagtaggccggcgcctgccgggaagcgagccgcgacccgagctgaggtcattttcttctgaggaagtcattcttaaggactgttctgtccccaaccccagctggaacaaggacctaagactgctctttgaccagtttatgaagaaatgtgaagacggctcctggaaacgtttgccttcatataaacgtacacctactgaatggattcaagacttcaaaacccattttcttgcctggttaatggccgggcgctgtggctcacgcctataa

SEQ ID NO: 48108 - DNA, 1116 bp, Homo Sapiens
atggctgcaacctgtgagattagcaacatttttagcaactacttcagtgcgatgtacagctcggaggactccaccctggcctctgttccccctgctgccacctttggggccgatgacttggtactgaccctgagcaacccccagatgtcattggagggtacagagaaggccagctggttgggggaacagccccagttctggtcgaagacgcaggttctggactggatcagctaccaagtggagaagaacaagtacgacgcaagcgccattgacttctcacgatgtgacatggatggcgccaccctctgcaattgtgcccttgaggagctgcgtctggtctttgggcctctgggggaccaactccatgcccagctgcgagacctcacttccagctcttctgatgagctcagttggatcattgagctgctggagaaggatggcatggccttccaggaggccctagacccagggccctttgaccagggcagcccctttgcccaggagctgctggacgacggtcagcaagccagcccctaccaccccggcagctgtggcgcaggagccccctcccctggcagctctgacgtctccaccgcagggactggtgcttctcggagctcccactcctcagactccggtggaagtgacgtggacctggatcccactgatggcaagctcttccccagcgatggttttcgtgactgcaagaagggggatcccaagcacgggaagcggaaacgaggccggccccgaaagctgagcaaagagtactgggactgtctcgagggcaagaagagcaagcacgcgcccagaggcacccacctgtgggagttcatccgggacatcctcatccacccggagctcaacgagggcctcatgaagtgggagaatcggcatgaaggcgtcttcaagttcctgcgctccgaggctgtggcccaactatggggccaaaagaaaaagaacagcaacatgacctacgagaagctgagccgggccatgaggtactactacaaacgggagatcctggaacgggtggatggccggcgactcgtctacaagtttggcaaaaactcaagcggctggaaggaggaagaggttctccagagtcggaactga

SEQ ID NO: 48109 - DNA, 2075 bp, Homo Sapiens
acaactctctcaactcatatctaagggctaagtccactttaaccttccaatatcattacatcatatttaaacattgactctatctggtcaaggacgacaacattttatttctcctgacccttttgctatcagatctggccttgtcagtttttcaatttcattcttagaatggaaacttaattcacacaagttgaacaagtagtcatcagggggcaaaacccagtggatgatggttttgtgtgctgtttggagactgggtgtttaccacacagcagtggatttcataaattccagggtcagacaagattccagtagcgacacacttgactaatatgagaaaatgcaggattaggcaatcaacaatgaggaagtcagccaagttgccacccaaaaattacttaccacagcagctgcagtccagaaatgctaacaagccagtctccctaggagtgggccatactcagctgtggaccactcacaacattttctcactttattttgcttcagagtcagtgtactgcaatgatttctcctttgcttgctttatatgtttaaaattgtcttccctaaaagctgaacttaaaattaatgtttgctaccaaaagggggtagcagtgcctagtcatgtaggcatatgtcccactctgtcggtacagagggtaagcagcctcttcctttttaaaaaatttattacgatgatttacaaaaattgaagcttacaggataaacactcaacaaaaaagtagccagtctcaagaaaccaatttttatgtatgaattaatattattttattaatccatggccaggatgattcttaagattatttcttaattctctgaacagcttaaaagagagaaactccttcttttttatttacttgctttgaggttgatactcttaggtttttaacataactctctagctttgacaactcctcttataatttaaaatccttatagcttccatttacaagtaaggattatatctattttagtctcctcaatcagctacctaggagaagacttgccacttggaaagagaaagatagcacccactctccagttctcttctcccaaagttgcccgtatttcccttccctgaagccaatcaaatactttattgtttctcgctaagagtaatttttcactcttaagtacaaacagctcaacaaaaattcccggtagcataaatatgcacatcaataaaataattactactcacaatagactttccattacatatgtttcacaagcattggttttcttaaaaagaaccacgcatacagcactcaaattattgcagattctaactcagtagagtttgatttaatgtttttacaatattttttttaaagaagtgtccttccaacgctaaggaaaaaaatcagaatcaagaaaattctgtttcttagcaacagaaaaatcaaacttctgttactaagtttggtaacagaacagtactctaaattatcctctgaaccacctgatttaccatgtgatgctgggcacattgctgctaattaatcttcctaatctcgtgggatcacaatatgaataacaagaatgaacatcagacacatctgtgggaattatgagggggagattataaagagtcaaaccttgtccccatatttaaattttataataactataactactagtagaaatataactactaccctctcatatatatgtgatgttattaagtttataaagtgttttgatatgtttcttatttcatcttcatggctgctatttattcatagaaaaataattctcagtatctgtagcattattgttaatgtcaatcctatagaggctggaacaggctcagagaggctaagtaacttgcctaactaagtctcctggttgacaataggtcttaatgcagtgttttccgaatccctcgttcttacatcaaaacagaactgtggctgggtgtggtggctcatgcctgtaatcccagcaatttaggaggccaaggtgggaagatcacttgagcccaggaatttgagaccagcctgggcaacatagtgagtgagacctcaatctctgccaaaaaaaaaaaaaaaaaa

SEQ ID NO: 48110 - DNA, 1563 bp, Homo Sapiens
tgttcttgcagaaggaaactccacttgccaatgctgcattctgggcagccaggagaggaaacctggcgctgctgaagctgctgttgaacagcggccgggtggacgtggactgcagagacagccatggcaccacactcctgatggttgctgcctacgctggccacatagactgtgtgagggaactggttctgcaaggagcagacatcaatctccagagagaggtaggtacaactgccctattctttgccgcccagcaaggccataatgatgtcgtgagatttctctttggatttggagcatccactgaatttaggaccaaagacgggggcaccgccctgttggctgccagtcagtacgggcacatgcaggtggtggagaccttgctgaagcacggagcaaacatccatgaccaactttatgatggagccactgccctcttcctagctgcccaaggtggttacttggatgttattcgattactgctggcttcaggagcaaaagtcaaccagccaaggcaggacgggacagcgcccctgtggatcgcgtcccagatgggccacagcgaggtggtgcgggtgatgctgctgcgcggagccgaccgcgacgctgcgcggaacgatggcacaacagcattattgaaagcagccaacaaagggtataatgatgtcataaaagagttgcttaaattctcacccactcttggtattttgaaggccaatgaacttccggcagaactaaccaaaaatgaacgtatattgcgtctcctgagaagtaaagaaggtcccagaaagagctaacttagctccatatttgacagaaagatagaaagcttaaccacattgtccaaaaagaaattgcatttcaagcagtgttggaaattcttttatgaaaaaaaaagatgcccagaatgcccatcctgtgggtccctgacaaagaagagctacgctctgtgcacgaagtcaagaaccaaacagctcagggaccctcttgccccttcaccatggacttctcatggtgtcctgtaactcatctcccggggggcctggcatgttcacagattccacagaaactcattttcaacaatgctaacttggacctgtcagttaaactctaaggtggacagggttctcagtactaagcaaggagacagaatgctttgttcctttaaaagactgaaaagctgaccttcaatggattgaggcacttttgcttttgtgttaaatgtagatgtgctaaaatatatagatctatcatattttacctacatatgtatgtcattccagtataaaacattctcctctacccaagaaccatagccatgattgttataaatcaatgaagtgtaaacatacattattaaaaaaccacttctgacattccattatgtgctattcaaagatggactattgaactatagaaaagacagactgtgcatttgttcgttgatcctcatcttattcctgacatgtaaaaatcaattttacgtagagtcaacattgtaggtaggttaaaataccagtggcaaatttggaaattcagaaacttataaaccacgagaaatat

SEQ ID NO: 48111 - DNA, 267 bp, Homo Sapiens
gaccaactcttgcgtaaaaagagaagaatttttatccattcagtgggtgcaggcacaataaatgccttgctggattgcctattagaggatgaagttattagccaggaagacatgaacaaagtgagagatgaaaatgacactgtcatggataaggctcgagtcttgattgaccttgttactggaaaaggacccaagtcttgctgcaaatttatcaagcatctctgtgaagaagaccctcaacttgcctcaaagatgggtttgcactaa

SEQ ID NO: 48112 - DNA, 759 bp, Homo Sapiens
ttcgatgtacaggtgggcctgcacgaactgctgggctatggcagcggcaagctcatcgagcaggatgaaaaaggagcattcaactttgaccaggagacccatcaatccagagatgagagaattcagagctggtatcggagcatgaagacctgggacagcaagttcagcaccattgtctccagctacgaagagtgccgggctgagagcgtgggcctctacctctgtctccacccgcaagtgctggagacctttggctttgagggggctgatgcagaggaggtgatctccgtgaactggctcaacatggttggggctgggctgctcgctctggagttctacacacctgaggcctccaactggcagcaggcccatatacgggcccggattgtgatcctgagagtcttaccagaggctggcgagggactcggtaccatcactcccaccgcaggctccgatgggcgcccggaagcccaggtccgtctcgaccgcagcaagatccagtctgtgggcaaccctgccctagagcgcttcctgcggaggtgctggtccacaggggatgtggccggagggtggaccctgtacgagaggtatgcagcagtcgctgatgcgccccctgagggctttctcaccctcagggacagggtgctgctgcgtaaggaatcttggaagctcatcgttcagcccaacattcgccttgaaggctcagacgtgcagcttctggaatacgaggtctcagctgctggcctcatcagatccttc

SEQ ID NO: 48113 - DNA, 1857 bp, Homo Sapiens
gacaaaccttacaaatataagaaatgtggcaatgcctttaaattttcttcaacgttcactaaacataagagaattcatactggagagacacctttcagatgtgaagaatgtggcaaagcttttaaccagtcctcaaatcttactgaccataagagaattcatactggagagaaaacctacaaatgtgaagaatgtggcaaagcttttaaggggtcctcaaattttaatgcacataaggtaattcatactgcagagaaaccctacaaatgtgaagattgtggcaaaacttttaaccatttctcagcccttagaaaacataagataattcatactggaaagaaaccctacaagcgtgaagaatgtggcaaagcttttagccagtcctcaacccttagaaaacatgagataattcatactggagagaaaccctacaaatgtgaagaatgtggtaaagcttttaagtggtcttcaaaacttactgtacataaggtagttcatactggagagaaaccctacaaatgtgaagaatgtggcaaagcttttagccagttctcaacccttaaaaaacataagataattcatactggaaagaaaccctacaaatgtgaagaatgtggcaaagcttttaacagttcctcaacccttatgaaacataagataattcatactggggagaaaccatacaaatgtgaagaatgtggcaaagcttttaggcaatcctcacaccttactagacataaagcaattcatactggagagaaaccctacaaatgtgaagaatgtggcaaagcttttaaccatttctcagaccttagaagacataagataattcatactggaaagaaaccctacaaatgtgaagaatgtgggaaagcttttagccagtcctcaacccttagaaaccatcagataattcatactggagagaaaccctacaaatgtgaagaatgtgaatgtggcaaagcttttaacaattcctcaatccttgctaaacataagataattcatactgggaagaaaccgtacaaatgtgaagaatgtggcaaagcttttaggcaatcctcacaccttactagacataaagcaattcatactggagagaaaccttacaaatgtgaagaatgtggcaaagcttttagccatttctcagcccttagaagacataagataattcatactggaaagaaaccgtacaaatgtgaagaatgtggcaaagcttttagccatttctcagcccttagaagacataagataattcatactggagagaaaccctacaaatgtgaagaatgtggtaaagcttttaagtggtcatcaaaacttactgtacataaggtaattcatactgcagagaaaccctgcaaatgtgaagaatgtggcaaatcttttaagcatttctcagcccttagaaaacataaggtaattcatactggagagaaaccctgcaaatgtgaagaatgtggcaaagcttttaagcatttctcagcccttagaaaacataaggtaattcatactggaaagaaaccctacaaatgtgaagaatgtggcaaagcttttagccaatcctcatcccttagaaaacatgagataattcatagtggagagaaaccatacaaatgtgaagaatgtggtaaagcttttaagtggttgtcaaaacttactgtacataaggtaattcatactgcagagaaaccctgtaaatgtgaagaatgtggcaaagcttttaagcatttctcagcccttagaaaacataagataattcatactggaaagaaaccctacaaatgtgaagaatgtggcaaagcttttaatgattcctcaacccttatgaagcataagataattcatactgggaag

SEQ ID NO: 48114 - DNA, 2470 bp, Homo Sapiens
ggatcaggcctcagtggctttagaggatgtggctgtgaacttcacccgagaagagtgggctttgctgggtccttgtcagaagaatctctacaaagatgtgatgcaggaaaccatcaggaacctggattgtgtagtaatgaaatggaaagaccagaacattgaagatcaatatagatatcccaggaaaaatctaagatgtcgtatgttagagagatttgttgaaagtaaagatggaactcaatgtggagaaacatctagccagattcaagatagtattgtgaccaagaacactcttcctggagtaggtccttgtgaaagcagtatgagaggagaaaaagtcatgggtcattcatcccttaattgttacatcagagttggtgctgggcacaaaccacatgagtatcatgaatgtggagagaagccagatacgcataaacaacgtgggaaagccttcagttaccacaactcatttcaaacacatgagaggcttcacactggaaagaaaccatatgattgtaaagaatgtgggaagtccttcagttctttgggaaaccttcaaagacacatggcagtgcagcgtggagatggaccttataaatgtaagttgtgtgggaaagcgtttttttggcccagtttattacatatgcatgaaagaacgcacactggagagaaaccatatgaatgtaagcagtgttctaaagccttttctttttacagttcctatctaagacatgaaagaacacatactggggagaaaccgtatgaatgtaaacagtgttctaaagcctttcctttttacagttcctatctaagacatgaaagaacacatactggggagaaaccatataaatgtaagcagtgttctaaagccttccctgattccagttcttgtctaatacatgaaagaactcacactggagagaaaccctatacatgtaaacaatgtgggaaagccttcagtgtttccggttcccttcaaagacatgaaaccactcacagtgcagagaaaccctatgcatgtcagcaatgtgggaaagcgtttcatcatctgggaagctttcaaagacacatgataaggcacactggaaatggacctcataaatgtaagatatgtgggaaaggctttgattgtcctagttcactgcaaagtcatgaaagaactcacactggagagaaaccctatgaatgcaagcagtgtgggaaagcattatctcatcgctcaagctttcgaagtcatatgataatgcacactggagatggacctcataaatgcaaggtatgtgggaaagcctttgtttatcccagtgtatttcaaagacatgaaaggactcacactgcagagaaaccctataaatgtaaacaatgtggcaaagcctaccgtatttccagttcccttcgaaggcatgaaacaactcatactggagagaaaccctataaatgcaaacttgggaaagcctgtattgatttctgttcctttcaaaatcacaaaacaactcacactggagagaagccatatgagtgtaaggaatgtgggaaagcattcagtcgtttcagatacctttctcgacataaaaggactcacacaggagagaaaccttatgagtgtaaaacatgtaggaaagccttcggtcattatgataacttaaaggtacatgaaagaattcactctggagagaagccgtatgaatgtaaggaatgtgggaaagcattctcttggctcacttgctttctacgacatgaaagaattcacatgagagagaaatcctatgaatgtccacaatgtggtaaagccttcactcattcccgttttcttcaaggacatgaaaaaactcatactggagagaacccgtatgaatgtaaggaatgtgggaaagcatttgcttctctcagttccttgcatagacataaaaagactcactggaaaaaaactcacactggagagaacccatatgaatgtaaggaatgtgggaaagcatttgcttctctcagttccttgcatagacataaaaagactcactagcattctctctaaatgtatggaatgtgggaaagcatttattaattttatttcatttcagatacttgtacgaaacacattggagatagaccctgtgaatgtaagcacttggtaaagccttaagtagtttcagtttctttccagtacagtcatcccttgatacctgctgggtattggttccagcactccgtgagccatgtccagtcccttttataaaatgacatgtttgtatgtaacttacccacatcctcttgtatagtctcaattatgtctagattacttaaaatacctcatgcattataaaagctatgcaaatagttgttctattgtattgtttagggaatcatgataaggaaaagagtctatgtattttcagtatagatgcagtaattgtgagcctatcaacatagtgtagtcagccagaacattaaagtttctttgtttcaactctca

SEQ ID NO: 48115 - DNA, 333 bp, Homo Sapiens
atgtcagacgcagccgtagacgccagctccgaaatcaccatcaaggacttaaaggagaagaaggaagttgtggaagaggcagaaaatggaagagacgcccctgctaacgggaatgctaatgaggaaaatggggagcaggaagctgacagtgaagtagatgaagaagaggaagaaggtggggaggaagaggaggaggaagaagaaggtgatggtgaggaagaggatggagatgaagatgaggaagctgagtcacctacgggcaagcgggcagctgaagatgatgaggatgacgatgtcgataccaagaagcagaagaccgacgaggatgactag

SEQ ID NO: 48116 - DNA, 492 bp, Homo Sapiens
atgagctgccgcggacggggcgcgggcggacgatggaactccacatcctggagcaccggctgcaagttgccagcgtcgccaaggagagtatcccgctgttcacctacgggcctgatcaaacttgccttcctgttctccaagaccaggtgcaagttcttcagtctgactgagacaccagaggattacactatcattgtcgatgaggaaggattcctagagctgccctcctcggagcacctgagtgtggcggatgccacctggctggccctgaacgtggtgtccggcggtggcagcttctccagctcccagcctattggcatgaccaagatcgccaagtcagtcatcgccccactggctgaccagaacatatccgtgttcatgctgtccacgtatcagacagacttcatcctggtgctcaagcgggacctgccctttgtcacccacacgttgtcatcagagttcaccatcctgtggtcagtggctagactgtag

SEQ ID NO: 48117 - DNA, 165 bp, Homo Sapiens
atggcgcatgtggattttaggcctccagcctactccccagcccaacccagtcacacctatactcacggattaggtctccattgccgacctggagccgggcactgctctgcctctccaggtcctgcagcaccgactgctcgaatgccagggcggctacgcggctga

SEQ ID NO: 48118 - DNA, 728 bp, Homo Sapiens
gccccgtagggctggaccctacgttagcctgccctgctcggggttggcgatgctggaggtgggccttggaccagagaaaatgctttaattaggtgacaagcgggcagaggcctttgtctctggcgccggcagccacggcccccgctgacggcgtgggaaacagaccctgttccactccggtctccagccttggaatggttgccttcgtgcagtgcaggaggacgcggcagagggcggacgatcgctccactcgccgggaccaggtgcgggggccctgcccagccgctggggcgtggccaggctcgaagcacccaggtgtcgggggccgactctaagccctggcaccggaagagagagggcggcggattggacctcccggctccagcattgcaactgggcgctccgtctcctggtccacgcaatgatgctgcggctgctcagaagccaggtagcctgccctgggtgaagccttcgcgcaggtcaatgacggggcggaggggcagggcgcggtcccctgcatccccgatctggggagcggtgggcccaggggccatcgccttagcccctggcgctggggctcggcgccaagtgacgggcggggctccaccttccagccatccgcccggcccgggagggcggacgctgcgagactcccggccgcgccctctccttcctctcctccccaagccctcgctgccagtccggacaggctgcgcggaggggagggc

SEQ ID NO: 48119 - DNA, 930 bp, Homo Sapiens
atggagaattgtacggaagtgacaaagttcattcttctaggactaaccagtgtcccagaactacagatccccctctttatcttgttcaccttcatctacctcctcactctgtgtgggaacctggggatgatgttgctgatcctgatggactcttgtctccacacccccatgtactttttcctcagtaacctgtctctggtggactttggatactcctcagctgtcactcccaaggtcatggctgggttccttagaggagacaaggtcatctcctacaatgcatgtgctgttcagatgttcttctttgtagccttggccacggtggaaaattacttgttggcctcaatggcctatgaccgctatgcagcagtgtgcaaacccctacactacaccaccaccatgacggccagtgtaggtgcctgtctggccctaggctcatatgtctgtggcttcctaaatgcctcattccacattgggggcatattcagtctctctttctgtaaatccaatctggtacatcactttttctgtgatgttccagcagtcatggctctgtcttgctctgataaacacactagtgaggtgattctggtttttatgtcaagctttaatatcttttttgttcttctagttatctttatctcctacttgttcatattcatcaccatcttgaagatgcattcagctaagggacaccaaaaagcattgtccacctgtgcctctcacttcactgcagtctccgtcttctatgggacagtaatcttcatctacttgcagcccagctccagccactccatggacacagacaaaatggcatctgtgttctatgctatgatcatccccatgctgaaccctgtggtctacagcctgaggaacagagaagtccagaatgcattcaagaaagtgttgagaaggcaaaaatttctataa

SEQ ID NO: 48120 - DNA, 1904 bp, Homo Sapiens
gacacccgagcgggggccggaagtggggccacagctcgcagcaggagctccgggctagaccgtggcgccggcagcggcccctgggctggaggaggatgatgaggagcgacggaagcgacgcgggggtacgctgctgcgcggcgcccggtttcgtgcccgcggccgactgcgcagcctgtccgcgagtctgagatacttacagagagctacaatggaaaagtcctggatgctgtggaactttgttgaaagatggctaatagccttggcttcatggtcttgggctctctgccgtatttctcttttacctttaatagtgacttttcatctgtatggaggcattatcttacttttgttaatattcatatcaatagcaggtattctgtataaattccaggatgtattgctttattttccagaacagccatcctcttcacgtctttatgttcccatgcccactggcattccacatgaaaacattttcatcagaaccaaagatggaatacgtctgaatcttattttgatacgatacactggagacaattcaccctattccccaactataatttattttcatgggaatgcaggcaacataggtcacaggttgccaaatgcattacttatgttggttaacctcaaagttaaccttttgctggttgattatcgaggatatggaaaaagtgaaggagaagcaagtgaagaaggactctacttagattctgaagctgtgttagactacgtgatgactagacctgaccttgataaaacaaaaatttttctttttggccgttccttgggtggagcagtggctattcatttggcttctgaaaattcacataggatttcagccattatggtggagaacacatttttaagcataccacatatggccagcactttattttcattctttccgatgcgttaccttcctttatggtgctacaaaaataaatttttgtcctacagaaaaatctctcagtgtagaatgccttcacttttcatctctggactctcagatcaattaattccaccagtaatgatgaaacaactttatgaactctccccatctcggactaagagattagccatttttccagatgggactcacaatgacacatggcagtgccaaggctatttcactgcacttgaacagttcatcaaagaagtcgtaaagagccattctcctgaagaaatggcaaaaacttcatctaatgtaacaattatataatgtttccctttttgattattgcattgtattttaatttgtgcagaatgataaagaatgttccttttagaagtgtgttatgtctgtacctgtctgaagagtgacattaaactttgaaaggacttcactgctcctttacgatattccaaatagttttttacattggaaaaactaattcttgggattctttcatacattttcatcaaaactttcagtgtgattatgtattcatatcttcagtttaatatgtcagtataatagatattgttcaaaagtttcttgttgctaaagtggtgtaatctgttacacagatgaatagctagatgtggaaagagatatgtaaacaagaaacctttgggtattgtttcttaagtaaatattgggacaatcatggtaagcaaacttagttctgtaactgcatttttcaccttaaaagttaaatgaaatgcatgatggtattttattccttgaattatgcaatgcaacattttacatgtaaatagcactggtcatatactgatgtatatggttatctgggttatatctatttttatgtaaactctattttgtttttggcaagaagtgaaattgagacttatgtgcaggttgccattgaattttgctctggtgaatgctgagatccagctttttcttacaaataaatgggaccctgttttccaat

SEQ ID NO: 48121 - DNA, 2286 bp, Homo Sapiens
atgttccgcctctggttgctgctggccgggctctgcggcctcctggcgtcaagacccggttttcaaaattcacttctacagatcgtaattccagagaaaatccaaacaaatacaaatgacagttcagaaatagaatatgaacaaatatcctatattattccaatagatgagaaactgtacactgtgcaccttaaacaaagatattttttagcagataattttatgatctatttgtacaatcaaggatctatgaatacttattcttcagatattcagactcaatgctactatcaaggaaatattgaaggatatccagattccatggtcacactcagcacgtgctctggactaagaggaatactgcaatttgaaaatgtttcttatggaattgagcctctggaatctgcagttgaatttcagcatgttctttacaaattaaagaatgaagacaatgatattgcaatttttattgacagaagcctgaaagaacaaccaatggatgacaacatttttataagtgaaaaatcagaaccagctgttccagatttatttcctctttatctagaaatgcatattgtggtggacaaaactttgtatgattactggggctctgatagcatgatagtaacaaataaagtcatcgaaattgttggccttgcaaattcaatgttcacccaatttaaagttactattgtgctgtcatcattggagttatggtcagatgaaaataagatttctacagttggtgaggcagatgaattattgcaaaaatttttagaatggaaacaatcttatcttaacctaaggcctcatgatattgcatatctactaatttatatggattatcctcgttatttgggagcagtgtttcctggaacaatgtgtattactcgttattctgcaggagttgcattgtaccccaaggagataactctggaggcatttgcagttattgtcacccagatgctggcactcagtctgggaatatcatatgacgacccaaagaaatgtcaatgttcagaatccacctgtataatgaatccagaagttgtgcaatccaatggtgtgaagacttttagcagttgcagtttgaggagctttcaaaatttcatttcaaatgtgggtgtcaaatgtcttcagaataagccacaaatgcaaaaaaaatctccgaaaccagtctgtggcaatggcagattggagggaaatgaaatctgtgattgtggtactgaggctcaatgtggacctgcaagctgttgtgattttcgaacttgtgtactgaaagacggagcaaaatgttataaaggactgtgctgcaaagactgtcaaattttacaatcaggcgttgaatgtaggccgaaagcacatcctgaatgtgacatcgctgaaaattgtaatggaacctcaccagaatgtggtcctgacataactttaatcaatggactttcatgcaaaaataataagtttatttgttatgacggagactgccatgatctcgatgcacgttgtgagagtgtatttggaaaaggttcaagaaatgctccatttgcctgctatgaagaaatacaatctcaatcagacagatttgggaactgtggtagggatagaaataacaaatatgtgttctgtggatggaggaatcttatatgtggaagattagtttgtacctaccctactcgaaagcctttccatcaagaaaatggtgatgtgatttatgctttcgtacgagattctgtatgcataactgtagactacaaattgcctcgaacagttccagatccactggctgtcaaaaatggctctcagtgtgatattgggagggtttgtgtaaatcgtgaatgtgtagaatcaaggataattaaggcttcagcacatgtttgttcacaacagtgttctggacatggagtgtgtgattccagaaacaagtgccattgttcgccaggctataagcctccaaactgccaaatacgttccaaaggattttccatatttcctgaggaagatatgggcaagtcaatcatggaaagagcatctgggaagactgaaaacacctggcttctaggtttcctcattgctcttcctattctcattgtaacaaccgcaatagttttggcaaggaaacagttgaaaaagtggttcgccaaggaagaggaattcccaagtagcgaatctaaatcggaaggtagcacacagacatatgccagccaatccagctcagaaggcagcactcagacatatgccagccaaaccagatcagaaagcagcagtcaagctgatactagcaagtaa

SEQ ID NO: 48122 - DNA, 624 bp, Homo Sapiens
ccaaaataccgtgaccagattcttaacccaggactgatggtttttccaaaaccagtcactgcattggaatatgcattcagtaggtctgatctaacttcgtatgcagggtacactgaagaccttaagaagtttctaaaaccatatactttagaagaacagaaaaacctcacagtctgtcctgatggagcactttttgaacagaagggtccagtttatgttgcttgtcaatctcccatttcgttacttcaagcatgccgtggtatgaatgatcttgatttcggctattctcaaagaaacccttgtattcttgtgaaaatgaacagaataattggattaaagtctgaaggagtgccaaggatagattgtgtttcgaagaatgaagatataccaaatgtagcagtttatcctcataatggaattatagacttaaaatatttcccatattatggggaaaaactgcatgtggggtatctacagccattggttgctgttcaggtcagctttgctcctaacgatactgggaaagaagtaacagttgaatgcaagattgatggatcagccaaccttaaaagtcaggatgatcgtgacaagtttttgggacgagttatgttcaaaatcacagca

SEQ ID NO: 48123 - DNA, 966 bp, Homo Sapiens
atgctaacactgaataaaacagacctaataccagcttcatttattctgaatggagtcccaggactggaagacacacaactctggatttccttcccattctgctctatgtatgttgtggctatggtagggaattgtggactcctctacctcattcactatgaggatgccctgcacaaacccatgtactacttcttggccatgctttcctttactgaccttgttatgtgctctagtacaatccctaaagccctctgcatcttctggtttcatctcaaggacattggatttgatgaatgccttgtccagatgttcttcacccacaccttcacagggatggagtctggggtgcttatgcttatggccctggatcgctatgtggccatctgctaccccttacgctattcaactatcctcaccaatcctgtaattgcaaaggttgggactgccaccttcctgagaggggtattactcattattccctttactttcctcaccaagctcctgccctactgcagaggcaatatacttccccatacctactgtgaccacatgtctgtagccaaattgtcctgtggtaatgtcaaggtcaatgccatctatggtctgatggttgccctcctgatttggggctttgacatactgtgtatcaccaactcctataccatgattctccgggcagtggtcagcctctcctcagcagatgctcggcagaaggcctttaatacctgcactgcccacatttgtgccattgttttctcctatactccagctttcttctccttcttttcccaccgctttggggaacacataatccccccttcttgccacatcattgtagccaatatttatctgctcctaccacccactatgaaccctattgtctatggggtgaaaaccaaacagatacgagactgtgtcataaggatcctttcaggttctaaggataccaaatcctacagcatgtga

SEQ ID NO: 48124 - DNA, 405 bp, Homo Sapiens
gcttttgattcttttacaaaagctgtgaaagcaaatccagattttgcagaaagcttttatcagcgagggctttgtaaagtgaaactccacaaggatagctcgattctggattttaatcgtgcaattaccctcaatccaaaacattaccaggcatatttaagccgagtagcattctatggtttaaaaggcaggtattccaaagcaatcttgaattgtaacaaggctattaaaatttaccctgaaagcgtacgtgcctatctctacagaggagttctgaaatactacaacaagacttataagctagcaattacagatttaactacagctatcagcatggacaaaaatagttatacagcattttataacagagcattatgttacaccaagataagggaacttcaaatg

SEQ ID NO: 48125 - DNA, 2178 bp, Homo Sapiens
agccgagagcacgatggctactggggagctcggggacttgggtggctactacttcaggttcttgcctcagaaaaccttccagtctctgagctctaaggagatcaccagccggctccgccagtggtccatgctgggcagaatcaaggcgcaggcgttcggctttgaccagacctttcagtcctatcggaaggatgatttcgttatggcttttttcaaagacccaaatgttattcccaatttgaagttactttcagattcttctggacaatggatcatattaggaactgaagtgaaaaaaattgaagctataaatgttccttgcacacagctttcaatgtcattttttcatcggttatatgatgaagatattgtacgagacagtggacatattgttaaatgtttagattctttttgtgatccatttctcatttctgatgagttacgaagagttttgctagtggaagactcagaaaaatatgaaatattcagccaaccagatagagaagagttcctgttttgtcttttcaaacatctttgccttggtggagccctttgtcaatatgaggatgtgattagcccatatctggaaacaacaaagcttatctataaggatctggtgagtgttcgaaagaatcctcaaaccaagaaaatacagattacctcttctgtctttaaagtttcagcttatgattctgctggtatgtgctatccttcagcaaagaatcatgaacagacattttcttactttattgtggatcctatcaggcgtcaccttcatgttttataccactgttatggtgtgggagacatgtcttaatgttctttcagattatgtacctctactattttgtatttatcatttttctatcttaatactaacttatagataaacatatactttgcaaattaattcaagaaaaatgtaaggagcctacttagagcagaagaaagcaaacaccaagatgcctttttaaaaatttgtgtggaatactaaccggggatcaaatttcatccataataaaatctataccaaaaaagttgtggaatttttacagaaagttacaaggaattagaaatctagttcatatttgttgcattgtgattcaagtgaatcctcaattttccatgtattttaatttataagctaattaattatggattgaaaatgtagcagaaaactaaacatgtctaccactgatcattaatatgaattgttagtttatttaacttgtttcatttaattacatttcttcattgcacaagcgtttacatctgtaaagctaggcaaagcataacaattcttttgcttcatttgttccacttataagcctcagtaaagaagtaacgttctggggcctggcacggtggctcacgcctgtaatctcagcactttgggaggccaaggcgggcggatcacgaggtcaagagatcgagaccatcctggccaacatggtgaaaccccgtctctaccaaaagtacaaaaattagctggctgtggtggtgtgtgcctgtagtcccagctactcaggaggctgaggcaagagaatcacttgaacccgggaagtgaggttgcagtgagccgaggctgtgccactgtactctagctctggcaacagagcaagactccgtctcagaaaaaaaaaaggttctgaaagtggttgtaaactcttgtatcacataataaattaaaactgcagctgtcccacggctaatacaagagctacatgtaaacagagaaagttgcctgatggcattagtaagtcgttcaaagagtgagaagcaggttatcttagtactgttccttatttcattcatagaatgaatgtataacctagattgtttttggtttattttgatggcaaaaatcattgacatatatcccatgggtcatgggaagcctgtaagaaatgttgaggtttgaggaggagcaagtttgaaagatgtgtttctgtgttgtgggataaagacgataatcttggacttgaacctggatttgaatctggaatgcagctggcaatttgggtatagagctcaggagaaagagtatgttttacttctaatacctaacacaatgacttggcatattaaatgtttattgaatgaataactactttctagatatcctcataatacccatagatttttttaaattacataaaaacataaaatcaagaactg

SEQ ID NO: 48126 - DNA, 2020 bp, Homo Sapiens
ctaagacggataacgcgtcatctcgccttcccaaattttcccccctcgctagaccgggtccaaaacctccatccggagccggcaggagaggagaacgatgtttaactcggtcaacctgggcaacttctgctctccgtcgcgcaaggagaggggcgcagatttcggcgagcgagggagctgcgcctccaacctctatctgcccagttgcacttactacatgcccgagttctccacggtctcctccttcctgccccaggccccctctcgtcagatctcctatccctactcggcccaagtgcccccggtccgggaggtctcctacggcctggagccatccggcaagtggcaccatcggaacagctactcctcctgctatgcggcggccgacgagcttatgcaccgggagtgcctgcctccttccaccgtcaccgagatcctcatgaaaaacgaaggctcctacggcggccaccaccaccccagcgccccgcacgcaacccccgccggcttctactcctcagtcaacaagaacagcgtcctgcctcaagccttcgaccgtttcttcgacaacgcctactgcggtggcggcgacccgcccgccgagcccccctgctccggcaagggcgaggccaagggggagcccgaggcacccccggcctcgggactggcgtcccgggctgaggcgggtgccgaggcggaggctgaggaggagaacacaaatcccagctcgtccggttcagcccactccgtggccaaggagccggccaaaggagccgcccccaacgccccccgcacccgcaagaagcgctgcccttattcgaaattccagatccgggaactggagcgagagtttttcttcaacgtgtatatcaacaaagagaagcggctgcagctgtcccggatgctgaacctgacggaccgacaagtgaaaatttggtttcagaacagaaggatgaaagaaaagaaactgagcagagaccggctgcagtatttctcgggaaatcctctgctgtaacctgcagaccgggcccttttgggggcggggggaggggaaaattattttattttatttttattttttattttctaactcgtcttctttccgccggtggaaaactggactgtggccagggctggcccccaccgctgtggccggcactccattccggaacctcctggaccctctatctgactctcgctgtgggacagggaccgggcctggaaagggggtgaagggaagtgtctgatgcacggcgagtgaacaccgttggcgccgaggccaagactttgatttaaaagaaaacacacctcggcgacaatgtcttgctgctcggattaggtgggggaggggcgacagtagtgagcgcctgagccgaacaatcctcgaactaaaagccttcccttgcccatgtgaaaagatccgctaagacagcatgtctgccagcggaaacttctcgagctcccccctctaccccgccccaccttgcagctaaatgtgatcctgccttgctgtgaaatttctgtaccttcaacctggtgttaggtgtgcaaagtccgtgtcctacctccgtcttcgccaaggccccgcccgagcctagttgttctccccctgaatgtgtagaaccttcctttgaaatttcttaatcggtgcattgaggtttccacatctttttccaagcagtgccccacttcatggatttatagctatagtctatgcagtcgttacctcttttttttttttttttaagaaaattgaagattggggtggtggaggcagtagggagatgggattgggcacctcccccgtgctggggcctggatttttgtaaataaatttcccaagcgtttctttccacctggagggaaagggggggacgcccccagtgagattcaaatcacgcatctctactcctctgcgtgagtgcgtgtgtacatgtgcactccccaccctgctcccttcccagagggattgctgtgaaatttttttggtggcaaataaagataaatttcattctgttcaata

SEQ ID NO: 48127 - DNA, 165 bp, Homo Sapiens
gagtcttgcatccggaaccaggactgcgagactggctgctgccaacgtgctccagacaattgcgagtcgcactgcgcggagaaggggtccgagggcagtctgtgtcaaacgcaggtgttctttggccaatatagagcgtgtccctgcctgcggaacctgacttgt

SEQ ID NO: 48128 - DNA, 534 bp, Homo Sapiens
aataacttcagcacagaaataaacaccacttccattttagtaggacctcttgtttccaatctggaaataatccatacctcaaacctcacctgtgtaaaatttagcaatactatagcaacagccaactcccaatgcatcaggcgggttactcctcccacgcgaatagtctgcctaacctcaggaatattttttgtctgtggtacttcagcctatcgttgtttgaatggctcttcagaatctatgtgcttcctctcattcttagtgcccatgaccatctacactgaacaaaatttatacaatcatgttgcacctaagccccgcaacaaaagagtacccattcttccttttgttattggagcaggagtgctaggcggactaggtactggccctggcggtatcacagcatctactcagttctacaaactatctcaagaactaaatggtgacatggaacgggtcgctgactccctggtcacattgcaagatcaacttaactccctagcagcagtagtccttcaaaatcagacagcttta

SEQ ID NO: 48129 - DNA, 744 bp, Homo Sapiens
gttattttctcttactttcttcagacatctcgtggggaatttgactccagtgaatttgaagttaggagacgatatcaagatttcctttggttgaagggaaaactggaagaagcacaccccactctgattattccaccattgccagaaaagtttatagtaaaaggaatggtggaacgctttaacgatgacttcattgagacacgcaggaaggctttacataaatttttgaaccgaattgctgatcatccaactttaacatttaatgaagacttcaaaatttttctcactgcacaagcttgggaactctcttctcacaagaagcaaggtcctggcttgctaagcaggatggggcaaaccgtcagagctgttgcgtcctcaatgagaggagttaaaaaccgcccagaggagttcatggaaatgaataactttattgaactatttagccagaaaataaatttgatagataaaatatctcagagaatttataaggaagaaaggggctgttttggtattttgttcaacttaaatttgatgaattcacctgataaagaattcatagatcaatgtatctctctttgtgacttaattcagcttccagaggagattggaaaacttgaagataaagtggaatgtgctaataatgccctgaaagcagattgggagagatggaaacaaaatatgcaaaatgatatcaagttagcatttacagatatggctgaggagaatatccattattatgaacag

SEQ ID NO: 48130 - DNA, 1649 bp, Homo Sapiens
catcttgacattgacaagaccatgccagatgatgtccaaggcactgttgcaaccatttatacaagcagtgaacagcttcaactctttgcatttgaagcagaagtcaatgagaactttgagatggcagcagcatattataaagagagattggtccgtgagccccagaatctggatcactggttggactatggtgccttctgcctcctaactgaagacaacatcaaagcacaagagtgttttcagaaagccctttccctcaaccagagtcatatccacagcttgttgctgtgtggtgtcctggctgtcctgttggagaactatgagcaagcagaaattttctttgaggatgctacttgcttggaaccaactaatgttgtagcctggactttacttggtttgtactatgaaattcaaaacaatgatattcgaatggaaatggcatttcatgaggcctccaaacagcttcaggcacggatgcttcaggcacaagtaacaaagcaaaagagcactggtgtagaagacactgaggaaagagggaagagagaatctagtttaggcccttggggaatcacaaatggttctgcaacagcaatcaaggtggaagccccagcaggaccaggagctgcattatctattctagacaaatttcttgaagaatcctccaaactgcagtctgattcacaagaacccattttgactacacaaacttgggatccaagtataagccaaaaaccatctaacacatttatcaaggagataccaacaaagaaagaagcatcaaaatgtcaagattcatcagctcttctgcatcccggccttcattatggtgtttctcaaactaccaccatcttcatggagaccatacatttcttgatgaaagtcaaggctgtgcagtatgtgcacagagtgcttgcacatgagctgttatgccctcaaggaggccccagctgtgaatattacttggtgctggcccaaacacacattcttaagaagaactttgccaaggcagaggaataccttcaacaagcagcccagatggactacctgaaccccaatgtctggggcctgaagggccatctctattttctgagtggaaatcattctgaggccaaggcatgctatgaacgaaccattagctttgtagtggatgcttctgagatgcacttcatcttcctgagactggggctcatctatctggaagagaaagagctggaggagctcacagaggctgaggatgctctttctgaagccaatgcattgaacaactacaatgctgaagtatgggcatatctggctctggtctgcctgaaagttggacggcaattagaagctgagcaggcctacaagtacatgatcaagctgaaattgaaagatgaggctctgcttgcagagatccacacactacaggaaacagttggctttggaaatccatctttctgatacccctccagctgaacaattttctgcatgggactctgagttcctttccttcccagagagttttaccgtatgaagcctggagctggagaacgaaagaatcttcactataaacagagacccattcatttatttccattggctgtgttactggatgttttactggttgacgagaaactgggtcacaataaaaaaatggagatatgaaactc

SEQ ID NO: 48131 - DNA, 307 bp, Homo Sapiens
atggctggatgaacacagatgtgaggggatttgaaccatctacaatcaatccatatgtgaccaatgggaggagaagcagccccaaaagacgaaggaaccctcaaaagaagatgagcctcagcagaaggagatgccaacccatttgtccttaggagcagagtcaaaggcagaggctaaaactccagttctggttgagacacagacagtggacaatgccaatgagaaatcagaagtgtgtcagtggaatatggtcatcgtcagcatggattggaagtccttggagtctgaagacttgaggaatttgtga

SEQ ID NO: 48132 - DNA, 1199 bp, Homo Sapiens
acattataactagtaggggatcctcaccgaccatggccacagctgcctcgaatccctacagcattctcagttccacctccctagtccatgcggactctgcgggcatgcagcaggggagtcctttccgcaaccctcagaaacttctccaaagtgattacttgcagggagttcccagcaatgggcatcccctcgggcatcactgggtgaccagtctgagcgacgggggcccatggtcctccacactggccaccagccccctggaccagcaggacgtgaagcccgggcgcgaagacctgcaactgggtgcgatcatccatcaccgctcgccacacgtagcccaccactcaccgcacactaaccaccccaacgcctggggggccagcccggcaccgaacccgtctatcacgtcaagcggccaacccctcaacgtgtactcgcagcctggcttcaccgtgagcggcatgctggaacacgggggactcaccccacctccagctgccgcctctgcacagagcctgcacccggtgctccgagagcccccggatcacggcgaactgggctcgcaccattgccaggatcactccgacgaggagacgccaacctctgatgagttggaacagttcgccaaacaattcaaaagaagaatcaagttgggcttcacgcaggccgacgtggggttggcgctgggcacactgtatggtaacgtgttctcgcagaccaccatctgcaggttcgaaggcttgcagctgagcttcaaaaatatgtgcaagctgaagcccctgctgaacaagtggctggaggaggcggattcgtccacagggagcccgaccagcattgacaagatcgctgcacagggccgcaagcgcaagaagcggacctccatcgaggtgagtgtcaagggcgtactggagacgcatttcctcaagtgtcccaagcctgccgcgcaggagatctcctcgctggcagacagcctccagttggagaaggaagtggtgcgtgtctggttctgtaatcgaagacaaaaagagaaaagaatgactccgccaggggatcagcagccgcatgaggtttattcgcacaccgtgaaaacagacacatcttgccatgatctctgactggaggaagcgaggaggcggccggccgcactgggagcagcgcggatttctctttctctctcactctcttcctttcattctagt

SEQ ID NO: 48133 - DNA, 423 bp, Homo Sapiens
atgcaggaaagggctgtgagccaggaggcaaggtcacgcctgcctctgttgcccactcatgccatgccctctgagggactcagtttcccctcccgcacaatgcaagacctggatatattgaatgtgaagagcacgttccagtttggtatcctggctcccacaccctcccctcactctggctcagggccctcaatcatgatccttccccagaatccagacctggccatacctgatgaagagggtgcacaggaggaagatgatgaggcccacaatgctcggggcatcccaccactgggtctcatagccctcggggcctgccacaactgtctcgttgcccagctgggttggcaaatgggggttgcatttctgttctggagatgggagcacaatcaccctcagcccatgcaggccaggcctaggtag

SEQ ID NO: 48134 - DNA, 603 bp, Homo Sapiens
atggagtctgacaagatgccctctcccaagagcatgtgggaagatacacagataatggcacaaatactgaaggatatgaggattacaaagtatgaacttagagttataaatcagatgttggagtttgacttctggtatgtgactacaattttagatgagacaaaaatttacttaagccagtctaagaaagctactgttgatgcagatgatatgcgattggcaatgcagtgttgcactgaccagctgaccaaccaacagaaaaagatttctacttctgcaggaagagtaacaattccatggttaagcattggttcagttactagcagaccaagtaatcctacattaggtgcaaccaccccacaaatcatgtctgttttaactaaagtatggactccaatgtccctcacagaaaggtttacagtacagctttctgcttcacagactccagctataaaagcatcaatttctgcaacatcatcagtaaagagtgttccaattaatcaatcattatttaggtccaaaagcattcttattaccactaatatggagtcaccacaaaatattgccaatggatcatcaagtccatttaaaaggaagcattaa

SEQ ID NO: 48135 - DNA, 1170 bp, Homo Sapiens
agtggaagacgagtgatcaacgatgagtacaaaatacggaaaaaaaacaccccttttctttaccatttggtgatgacccatgctctggagtggccactaactgtccagtggcttccagatgaaatcagaccagaagggaaagatttcagcattcatcgacttgtcctggggacacacacattggatgaacaaaaccatcttgttatagccagtgtgacccctaatgataatgcttatgagaaaggagaatttggaggttttggttcagttagtggaaacattgaaatagaaatcaagatcaaccatgaaggagaagtaaatagggcccgttacatgccgcagaactcttgtatcatcaaaacaaagactccttccagtgatgttcttgtctttgactatacaaaatatccttctaaaccagatccttctggagagtgcaacccagacttgcgtctctgtggacatcagaaggaaggctatgggctttcatggaacccaaatctcagtgggcatttacttagtgcttcagatgaccacactgtctgcctgtgggacatcagtgccattccaaaggagggaaaagtggatgcaaggaccatctttacggggcatacagcagtagtagaagatgttttctggaatctgcttcatgagtctctgtttaggttagttgctgatgatcagaaacttatgatttgggatactcgttcaaaaaatacttccaaaccaagccactcagttgatgcttacactgctgaagtgaactgcctctctttcaatccttatggtgagttcattcttgctacaggatcagctgacaagactgttgccttgtgggatctgagaaatctgaaacttaaggtacattcctttgagtcacataaggatgaaatattccaggttcagtggtcacctcacaatgagactattttggcttccagtggtactgatcatggactgaatgtctgggatttaagtaaaatcacagaggaacaatccccagaagatgcagaagacaggccaccagagttgtttattcatggtggtcacactgccaagatacctgatttctccttgaatcccagtgaaccttggatgatttgttctgtatcagaaaacaacatcatggaagtgtggcaaatggcagagaacatttctaacggtgaagac

SEQ ID NO: 48136 - DNA, 762 bp, Homo Sapiens
atagaagattcgatggacatggacatgagccccctgaggccccagaactatcttttcggttgtgaactaaaggctgacaaagatgatcactttaaggtggataatgatgaaaatgagcaccagttatctttaagaacggtcagtttaggggctggtacaaaggatgaattgcacattgttgaagcagaggcaatgaattacaaaggcagtccaattaaagtaacactggcaactttgaaaatgtctgcacagccaacagtttcccttgggggctttgaaataacaccaccagtggtcttaagatttaagtgtggttcagggccagtgcatattagtggacagcacttagtagctgtggaggaagatgcagagtcagaagatgaagaggaggaggatgtgaaactcttaagtatatctggaaagcggtctgcccctggaggtggtagcaaggttccacagaaaaaaaaaacttgctatactccagccaaaaatgcacacaagtcaaatcagaatggaaaagactcaaaaccatcatcagcaccaagatcaaaaggacaagaatccttcaaaacacaggaaaaaactcctaaaacaccaaaaggatctagttctgtagaagacattaaagcaaaaatgcaagcaagtatagaaaaagggggttctcttcccaaagtggaagccgagttcatcaattttgtgaagaattgcttctggatgactgaccaagaggctattcaagatctctggcagtggaggaagtct

SEQ ID NO: 48137 - DNA, 369 bp, Homo Sapiens
atgacttcccctgaaattgcttccttatcatgggggcaaatgaaagtaaaaggctctaatacaacctataaggactgcaaagtatggccagggggtagtcggacttgggattggagagaaacaggaactgagcattctcctggtgtgcagcctgcagatgtgaaggaagttgttgagaagggtgtacagactcttgtgattggccgagggatgagtgaggccttgaaggtgccttcatcaactgtggagtacctcaagaaacatggcattgatgtgcgggtcctccagacagagcaggcagtgaaggagtataatgccttggttgcccaaggggtcagggtgggaggtgtcttccattccacctgctga

SEQ ID NO: 48138 - DNA, 698 bp, Homo Sapiens
ggcttctcattgcctgaagctggacgagtcagccactgggaggtctaggcttggtctctagcccaggctcagcctcagccttccagtgtgcatcttcctctctgggtttcagttttcctacctgtaacctaagttggactagaacatttccaagttcctcccagccctgtaaattctatctttgatacttatcttagatctttacaagggcttagcagtctcctaaaataagggaagagagttgcttctactctagcaaaaaaaaagttggggacagatgaaggaagaatgggtgaaatgttggaaatttgtgaagctgagtgagaagcaggtgggggttcattatgctactttcaccattttgtgtaacttaaaaattttccctgataaaaaaagtttttataaaatagaagttccattgaatttgagtgtctttacagcctttgttttctggtacccttgggaggcatcccgtttaataaaaggtaccttccacaggaaactcccttcctttgtcatctttggtatccccatctccatcttccacaacagacagtttgaacagccgcaccactccagcatcaggacagtttgggggggtttccagaatcttctattcccacttcccatttctcaaatcatttgacctgtcgtacgtacaaagtaaaaagtcctagacaagagacaggagaggattt

SEQ ID NO: 48139 - DNA, 1020 bp, Homo Sapiens
gtgcaggtggtcaccgcctgcctgctgaccctactcgtcatctggaccttgctgggcaacgtgctggtgtccgcagccatcgtgtggagccgccacctgcgcgccaagatgaccaacgtcttcatcgtgtctctacctgtgtcagacctcttcgtggcgctgctggtcatgtcctggaaggcagtcgccgaggtggccggttactggccctttgaagcgttctgcgacgtctgggtggccttcgacatcatgtgctccaccgcctccatcctgaacctgtgcgtcatcagcgtggcccgctactgggccatctccaggcccttccgctacgagcgcaagatgacccagcgcatggccttggtcatggtccgcccggcctggaccttgtccagcctcatctccttcattccggtccagctcaactggcacagggaccaggcgttgagggcagagaactgtgactccagcctgaatcgaacctacgccatcccttcctcgctcatcagcttctacatccccatggccatcatgatcgtgacctacacgcgcatctaccgcatcgcccaggtgcagatccgcaggatttcctccctggagagggccgcagagcacgtgcagagctgccggagcagcgcaggctgcacgcccgacaccagcctgcggttttccatcaagaaggagaccgaggttctcaagaccctgtcggtgatcatgggggtcttcgtgtgttgctggctgcccttcttcatccttaactgcatggttcctttctgcagtggacaccccaaaggccctccggccggcttcccctgcgtcagtgagaccacattcgatgtcttcatctggttctgctgggccaactcctcactcaacccagtctatgccttcaacgccgacttccggaaggtgtttgcccagctgctggggtgcagccacgtctgctcccgcacgccggtggagacggtgaacatcagcaatgagctcatctcctacaaccaagacacggtcttccacaaggaa

SEQ ID NO: 48140 - DNA, 369 bp, Homo Sapiens
gagctccggcctatttctctgcagcgttccttccctggcccggagacggaaaggcacacggtgtgcaggtgcagagacaccatgtccttaggaggcagtaccccaagagtggtgaaaacccctcccactgctcaccttggtctctcttccttctctcccttatccttgttcaagggccccgggttggcttcaacccggggcttccatggtttcaggttttccttcccttcctttttccccaaggtcgctggaaccagggctgccttccagcacttcatggggcacctggtacttctggccgtgtggccaaaggccccgcagtttttgcacttgagctgtgggtggaaaggaagtgatgtcagtgagtga

SEQ ID NO: 48141 - DNA, 1662 bp, Homo Sapiens
ttggcgatgcacaccctcactggcttctccctggtcagcctgctcagcttcggctacctgtcctgggactgggccaagccgagcttcgtggccgacgggcccggggaggctggcgagcagccctcggccgctccgccccagcctccccacatcatcttcatcctcacggacgaccaaggctaccacgacgtgggctaccatggttcagatatcgagacccctacgctggacaggctggcggccaagggggtcaagttggagaattattacatccagcccatctgcacgccttcgcggagccagctcctcactggcaggtaccagatccacacaggactccagcattccatcatccgcccacagcagcccaactgcctgcccctggaccaggtgacactgccacagaagctgcaggaggcaggttattccacccatatggtgggcaagtggcacctgggcttctaccggaaggagtgtctgcccacccgtcggggcttcgacaccttcctgggctcgctcacgggcaatgtggactattacacctatgacaactgtgatggcccaggcgtgtgcggcttcgacctgcacgagggtgagaatgtggcctgggggctcagcggccagtactccactatgctttatgcccagcgcgccagccatatcctggccagccacagccctcagcgtcccctcttcctctatgtggccttccaggcagtacacacacccctgcagtcccctcgtgagtacctgtaccgctaccgcaccatgggcaatgtggcccggcggaagtacgcggccatggtgacctgcatggatgaggctgtgcgcaacatcacctgggccctcaagcgctacggtttctacaacaacagtgtcatcatcttctccagtgacaatggtggccagactttctcggggggcagcaactggccgctccgaggacgcaagggcacttattgggaaggtggcgtgcggggcctaggctttgtccacagtcccctgctcaagcgaaagcaacggacaagccgggcactgatgcacatcactgactggtacccgaccctggtgggtctggcaggtggtaccacctcagcagccgatgggctagatggctacgacgtgtggccggccatcagcgagggccgggcctcaccacgcacggagatcctgcacaacattgacccactctacaaccatgcccagcatggctccctggagggcggctttggcatctggaacaccgccgtgcaggctgccatccgcgtgggtgagtggaagctgctgacaggagaccccggctatggcgattggatcccaccgcagacactggccaccttcccgggtagctggtggaacctggaacgaatggccagtgtccgccaggccgtgtggctcttcaacatcagtgctgacccttatgaacgggaggacctggctggccagcggcctgatgtggtccgcaccctgctggctcgcctggccgaatataaccgcacagccatcccggtacgctacccagctgagaacccccgggctcatcctgactttaatgggggtgcttgggggccctgggccagtgatgaggaagaggaggaagaggaagggagggctcgaagcttctcccggggtcgtcgcaagaaaaaatgcaagatttgcaag

SEQ ID NO: 48142 - DNA, 195 bp, Homo Sapiens
gtcatttgcttggaagacctcattcatgaaactgccttcccagggaagcatttccaggagagctcatggttcttgtgccctttccaccactcagtggcccgtcatgctaccaaaaatagagtgggcttcctcaaggagatgggcacagctggctatcagggtgaatgcatcaatcagctcatccgccagctgaac

SEQ ID NO: 48143 - DNA, 1700 bp, Homo Sapiens
tgagcgtttttttttttttttttttttttttttggtctgggcttccgaatatgttttatgacggttgattttacaccaggaggtttgtctccgaggaagacccagggaactggatatctagcgagaacttcctccggattccccggcgcctcgggaaaatgggagctgctgcaaagttggcgtttgccgtctttcttatctcctgttcttcaggtgctatacttggtagatcagaaactcaggagtgtcttttctttaatgctaattgggaaaaagacagaaccaatcaaactggtgttgaaccgtgttatggtgacaaagataaacggcggcattgttttgctacctggaagaatatttctggttccattgaaatagtgaaacaaggttgttggctggatgatatcaactgctatgacaggactgattgtgtagaaaaaaaagacagccctgaagtatatttttgttgctgtgagggcaatatgtgtaatgaaaagttttcttattttccggagatggaagtcacacagcccacttcaaatccagttacacctaagccaccctattacaacatcctgctctattccttggtgccacttatgttaattgcggggattgtcatttgtgcattttgggtgtacaggcatcacaagatggcctaccctcctgtacttgttccaactcaagacccaggaccacccccaccttctccattactaggtttgaaaccactgcagttattagaagtgaaagcaaggggaagatttggttgtgtctggaaagcccagttgcttaacgaatatgtggctgtcaaaatatttccaatacaggacaaacagtcatggcaaaatgaatacgaagtctacagtttgcctggaatgaagcatgagaacatattacagttcattggtgcagaaaaacgaggcaccagtgttgatgtggatctttggctgatcacagcatttcatgaaaagggttcactatcagactttcttaaggctaatgtggtctcttggaatgaactgtgtcatattgcagaaaccatggctagaggattggcatatttacatgaggatatacctggcctaaaagatggccacaaacctgccatatctcacagggacatcaaaagtaaaaatgtgctgttgaaaaacaacctgacagcttgcattgctgactttgggttggccttaaaatttgaggctggcaagtctgcaggcgatacccatggacaggttggtacccggaggtacatggctccagaggtattagagggtgctataaacttccaaagggatgcatttttgaggatagatatgtatgccatgggattagtcctatgggaactggcttctcgctgtactgctgcagatggacctgtagatgaatacatgttgccatttgaggaggaaattggccagcatccatctcttgaagacatgcaggaagttgttgtgcataaaaaaaagaggcctgttttaagagattattggcagaaacatgctggaatggcaatgctctgtgaaaccattgaagaatgttgggatcacgacgcagaagccaggttatcagctggatgtgtaggtgaaagaattacccagatgcagagactaacaaatattattaccacagaggacattgtaacagtggtcacaatggtgacaaatgttgactttcctcccaaagaatctagtctatga

SEQ ID NO: 48144 - DNA, 129 bp, Homo Sapiens
gatggctgtattcatagagcagccggcccctgtttgctagctgaatgtcgtaacctgaatggctgtgatactggacatgcaaaaatcacatgtggctatgaccttcctgcaaaatgtgagtacaactga

SEQ ID NO: 48145 - DNA, 306 bp, Homo Sapiens
atagacatgtctgtggaaaagatgacaaaagtagaagagagttttcaaaaggccatgggacttaagaagacggtcgacaggtggcgaaattcacatactcactgtctgtggcaaatggcattgggccagagaagaaacccgtatgccaccctaaggatgcaggacaccatggtacaggaattggcactggccaaaaagcaactactaatggtccgtcaagctgccctgcaccagctgtttgaaaaggagcatcagcagtaccagcaggaactaaatcagatgggcaaagctttttatgtagagaga

SEQ ID NO: 48146 - DNA, 291 bp, Homo Sapiens
atgaacaaaccgtatatcagaaacctcagcgagaacgccgcccccttggacctagaaggtatcttgaaggacgccaagatccccgtgtcgggacccttcctggtgaagattggctacgcgttcgtggactgcccagacgagatctgggccctcaaggccattgaggcgctttcaggtaaaatagaactgcacgggaaacccatagaagttgagcactcggtcccaaaaaggcaaaggattcggaaacttcagatacgaaatatccctcctcacttacagtgggaggtgctg

SEQ ID NO: 48147 - DNA, 483 bp, Homo Sapiens
atggtcaaccccaccgtgttctttgacacggagcccttgggccgcatctcctttgagctgtttgcagacaagtttccaaagacagcaggaaactttcatgctctgagcactggagagaaaggatttggctataagggttcctgctttcacagaattgttccagggtttatgtgtcagggtggagacttcacatgccatgatggcactggtggcaagtccatctacagggagaaatttgatgacaagaacttcatccggaagcatacagtttctggcatcttgtccatggcaaatgctggacccaacgcaaacagttcccagtttttcatctgtgctgccaagactgagtggttggatggcaagcatgtggtcttcagcaaggtgaaagaaggcatgaatattgtggagaccatggagtgctttgggtccaggaatggcaagaccagtaagaagatcaccattgctgactgtgggcaactctaa

SEQ ID NO: 48148 - DNA, 309 bp, Homo Sapiens
atgtgttttgccatatatgcaagtgaatcaacttgccagataaaagtttgctgcctaaatatgattactaggaaagccaagtctctcttcctggatttcttctcctataaaccgcctattgatacctacccacttctctatggagcacagatgaaggatattggtcatctccagcatctagcacaacgtctgcaatggaacaggcgagctgtgaatatttgtggaatgcatgggtggactaaagacctatcacctcactctagaatgcccagcatgttggagcatgttaagcactatatgagctgctga

SEQ ID NO: 48149 - DNA, 2443 bp, Homo Sapiens
gtgcgatcgggttgtgcttagcttggggtctcctggccccttgacgcgtcaggttgctgtacccctgcatcggatgcgctgtaccctgcgctggctccgtgaaccttagggacaacaccgggacacccgcgaggccggaaaatggactcagtggcttttgaggatgtgtctgtgagcttcagccaggaggagtgggctctgctggctccttcacagaagaaactctacagagatgtgatgcaggaaacattcaagaacctggcatctataggggaaaaatgggaagacccgaatgttgaagatcaacacaaaaaccaaggacgaaatctaagaagccatacgggagagagactctgtgaaggtaaagaaggtagtcaatgtgcagaaaacttcagtcccaatctcagtgtgacgaagaagactgccggagtaaaaccatatgagtgtactatctgtggaaaagccttcatgcgtctctcatcccttactagacacatgaggtctcacactggatacgagctatttgagaagccatataaatgtaaggagtgtgagaaagcctttagttatctcaaatcctttcaaagacatgaaaggagtcacactggagaaaaaccctataaatgtaaacaatgtggaaaaaccttcatatatcaccagccctttcaaagacatgagcggactcacattggagaaaaaccctatgaatgtaagcaatgtggaaaagctcttagttgttccagttcgcttcgagttcatgaaaggattcacactggagaaaagccctatgaatgtaaacaatgtgggaaagccttcagttgttccagttctattcgagtacacgaaagaactcacactggagagaaaccctatgcatgtaaggaatgtgggaaagccttcatttcccacacaagtgttctaacacacatgataacacacaacggagatagaccttataaatgcaaagaatgtggaaaggcattcatttttcccagttttttacgagtacatgaaagaattcacactggagagaaaccctataaatgtaaacaatgtggtaaagccttcagatgttccacctccattcaaattcatgaaagaattcatactggagagaagccctataaatgtaaagaatgtgggaaatctttcagtgcacgcccagcctttcgagtacacgtgagagtgcatactggagagaaaccctataagtgtaaagaatgtgggaaagcctttagtagaatcagttactttcgaatacatgaaaggactcacactggagagaaaccctacgaatgtaaaaaatgtgggaaaactttcaattatcctctagatttgaaaatccacaagagaaatcacactggagaaaaaccctatgagtgtaaggaatgtgcaaaaaccttcatttctcttgagaactttcgaagacacatgatcacccacactggagacggaccttataaatgtagggactgtgggaaggtgttcatttttcctagtgcgttacgaacacatgaaagaactcacactggagagaaaccctatgaatgtaaacaatgtggaaaagcctttagttgttctagttacattcggatacataaaagaactcacactggggagaaaccttatgaatgtaaggaatgcgggaaggcctttatttatcccacaagctttcaaggacacatgagaatgcatactggagagaaaccctataaatgtaaagaatgtgggaaggcctttagtcttcacagttcctttcaaagacatacaagaattcacaattatgagaaacctcttgaatgtaagcaatgtggaaaagccttcagtgtgtccacatccttaaaaaaacatatgagaatgcacaatcgatagaaactctataaatgtgagaaataggagaaagttttcaattctaacagatgctttcaaagttgtgaaaattcccactgaagagagaaatcctgtcaatgtaagtaatatagaaagcgagatacaagatgattcatgtatagtcaggtaccacataatcatgtttcagtcagcaatggaccatataggttggtagccccataagattatataacacctaaaacatttctatcaaccgcaatttagtagcagtagtaacaccatagtgcagcacattatttaagtgtttatggtgctggtgtaaacgtgctgcactttcagttgtataaaagtacaagacagcggccggggacggtggctcacgcctgtaatcccagcactttgggaggccaaggcgggcggatcacgaggccaggagatcaagaccatcctggctaacacggtaaaaccccatctctactaaaaatacaaacaattagccgggcgtggtggtgggcgcctgtagtcccagctacttgggaggctgaggcaggagaatggcataaacccaggaggccgagctgacagtgagctg

SEQ ID NO: 48150 - DNA, 1020 bp, Homo Sapiens
atggcagtcaagtggacgggtgggcattcttctcctgtcctctgcctgaatgcaagtaaagaagggctgctggcttctggagcagagggcggagatctcacggcttggggtgaagatggaactccattaggacacacgcggttccaaggggctgatgatgttaccagtgtcttattttctccctcctgtcccaccaagctctatgcctcacatggagaaaccattagtgtactggatgtcaggtccctcaaagattccttggaccattttcatgtgaatgaagaagaaatcaattgtctttcattgaatcaaacggaaaacctgctggcttctgctgacgactctggggcaatcaaaatcctagacttggaaaacaagaaagttatcagatccttgaagagacattccaatatctgctcctcagtggcttttcggcctcagaggcctcagagcctggtgtcatgtggactggatatgcaggtgatgctgtggagtcttcaaaaagcccgaccactctggattacaaatttacaggaggatgaaacagaagaaatggaaggcccacagtcacctggtcagctcttaaaccctgccctagcccattctatctctgtggcttcgtgtggtaatatttttagttgtggtgcagaagatggtaaggttcgaatctttcgggtgatgggagttaagtgtgaacaggaactgggatttaagggccacacttcaggggtatcccaggtctgctttctcccagaatcctatttgctgcttactggagggaatgatgggaagatcacgttgtgggatgcaaacagtgaagttgagaaaaaacagaagagtcccacaaaacgtacccacaggaagaaacctaaaagaggaacttgcaccaagcagggtggaaatactaacgcttcagtaacagatgaggaagaacatggcaacattttaccaaagctaaatattgaacatggagaaaaagtgaactggctcttgggtacaaaaataaagggacaccaaaat

SEQ ID NO: 48151 - DNA, 2271 bp, Homo Sapiens
cttcgcatgcagcgaatgtggaaaaggcttttatgagagtacagccctcattcaacacttcattatccatactggggagaggccctttaagtgccttgagtgtgggaaggccttcaactgcaggtcacacctcaagcagcatgagcggattcacactggtgagaagccctttgtgtgcagtcaatgtggaaaggccttcactcactattccacctatgtcctgcatgaaagagcccacactggagaaaagccttttgagtgcaaagaatgtgggaaagcctttagcattcgaaaagacctcattcgacacttcaacatccacactggagagaagccctatgagtgtttacagtgtggaaaggcttttacccgcatgtcagggctcacaaggcaccagtggattcatactggagagaagccgtatgtatgcatccaatgtgggaaagccttttgtcggaccacaaacctgattcgacactttagcatccacactggagagaagccctatgaatgcgtggagtgcgggaaggccttcaaccgcaggtcacccctcacaaggcaccagcggattcacactgcagagaagtcccacgaacccatccagagtgggaacgtttcttgtgagagcacagatctcattcaacactccatcatccacactgagagtagcccagtgagtgcagtgaatatggaaacgccttcaattgccgctcattcctcctcactcgacatcaacggattcatagtggaagaaaccctaccattgtaacagatgtggaaagactttttacgtacacttcagtcaacatccaagaattcctattagcgaaatagttttttaatataaccactgaagaaaatctgtggtgagaggaaacatcttaccatctggtcattcatactgaagagaaactccataagtatcatctctgtgggaaaacctgttttagatcatcatttgtcatctaaacaattatgttagaaattgacacagccaagagtcttattctacatctgataattcacccatgaaagagacccagtggttactgtgcacttaggaaaaccttcagccacatctttcttattagtttacagtgaaatgttatctcagggacattcaaacaaaggaggaggagtcatagggaagagaaagaaatggaagcacagcttctttcagacttccctgacaagcccatggcaatttgtcatcccctccttattttatttgggagagggaaatgtttcagaaacaaaagggcctcatcccctttattttccctgtgtatacattcactgctgtccagtgctgtagacaaacggtttgtttgaaaacattttgtgaaagcctgctttgttccacagcattgtctccactcttgaggagcagaagcatatatctttatgagaaagatggaggcttgagttatgaaatacttttacatttaaggagataaaggatgtacatatgaatgggcacattttactgcacacttcagacgctttgacttttttaaaaaaattgtttctccgtgtgtctttaaccacccagtaccatacttttttcttgatctggatctacttgtcaatttcttctttatttttctgtaggatggagatgatattgtagctgtttgtacataatgtaatccagggagtcctaattcttccctctgattgtggtttctcagcttttttactgctctttagagagagtaaatagttcaaaattcacctcaacaattttctagaggtcaatttggaaccaaaaatgaaataagacatgtagctaaagtaagttaaaagattatgataaactcagaaaataaacacagagaaggaatctcatttttcagtcttacagaagattgtgtgaaggctgactatacataaagtgactggaattttaacaggtgaacctgcatatgtatatgcaggtagttgtcaccatggattgagtccagtcgtagtaattaatatgtttaatcagaatattttggaatttctcttttggtattctttttgtttcttttattgtttttaattgacaatgtttatggggtttggtgtgatatttcaatacatgtgtgctaagagtaatgatcaaatcagggtaattagcatatccatctcaatcatttatcatttctttgtgtttagaaacattcacagtctgcttttctagctatttgaaaatataaaatgtattattgccaattgtactcattctgcagtgccacagaacactacaacttattcaaatggaatctt

SEQ ID NO: 48152 - DNA, 1026 bp, Homo Sapiens
atgcccttctccgacagccgcggggcgctgaagcgcctcccggcgcaggacgagtttcccgacctgagcggccaccaagacccagtggccgaggcgctgccccagctgaacgcggagctgcgcgccaggggtggcttcgcgctggaggccatccagacccgcgtggacagcccgggccacccgtacagggccgtgggccgcgtggcggccgacgaggagtcctacgacgtgttcaaggatctcttcggccccatccttgaggaccggcaccactacaagcccagcgatgagcacaagacccagctcaaccccgacaacctgctgggaggcggccacctggcccccaactgtgttgagctcgcggtgcgcacggcctccacttctgcctcccgtgggtcccgcgatggacgcagactggtcggcgacctggcgggcctggacgacgcgcgcaggagcaggaccgacgcggaacagcaacagcagctcctcgacagccacttcctcttccacgagcctgtaccgcccctgctcctggcctcgggctggcccaacgcccgcggcatctggcacaaggacagtaccttcctggtgtggggcggcgacgaggaccacctgcgggccatctccgtgcaacaggggggcaaaaaggaggcatttactgcttctgcctcggcctctcccggtttgaaactcttcaagtctaggaacgacgagttcatgtggaatcctcacctgggctccatcctcacctgccctcccaacctgggcacagggctggcaagtgtgcacatcaggctgccccacctgggcaagcacgagttctcggaggtgcttaagaggctaagtgggacagacggtgtggacgtggccgcggtgggtggggtctttgacgtctccaacgctgacctccggggcttctcagaggtggtgctggtgcagatgcgggtgggcgtcataaagctgctcattgagatggagcagtggcatcaccagggccaggccacctatggcctaatgcttgcccag

SEQ ID NO: 48153 - DNA, 888 bp, Homo Sapiens
atgcccttcccgcccatgccgccgccgcccgcccccgccccgggggcccaagccgcgcgccagttaccccggaggccctgcgccgcgggggacaagaagaagaggcccccacagcggcccgaggggctcctctccagctcctggccctccgccacgctcaagaggccgccggcccggcgcggccccggcctggacaggacgcagccgccggcccctccgggcgtctccccccaggccttgcccagccgcgcgcgggccccagccacgtgcgccccgccccggccggcaggctccggccacagcccagcgaggaccacctatgcggcgacctcggcggggacggggaccaccgccgcgggcacctcctcgggggcggggccttgtccagactccgctgcgcgcttctgcctgaatctcacccccgaggccgtcctggtcatccagaagcgtcatctggagaagcagctgctggcgcggccccgcaggcccttcccctcaccctcggccgaacccaggcgcctactcgccccgtgtctcccggctagggccgcgggcccgcggaggggcggccccgccagcgaccccgacgcaccccccaccgccggccagggccgccgcgcgcctccgcccggcgcccagctgctgcacggcggcctgcaggttccccagctcagcccgcggcccggggccctgcggccgatgctcaaggtgtcgctgctcaacgagcggcacaggtacgacgacgtggagtacgaggaggagccagaggcggtggacgagggcctggtacgcaagtgcacggagtggctgcgcggcgtggagtccgcggctgccgcgcggggccgggcgggggccctggactcacggcggcacctgagcacgctgtga

SEQ ID NO: 48154 - DNA, 1683 bp, Homo Sapiens
atgggccagcctgcaccctacgcagagggccctatacagggaggtgatgctggagaattatgcaaatgtgacttccttgtcagcatttccattccccaaaccagatctgatattccagctggagcaaggagaagcagcatggggcccagatccctggacacttgctgggggagaggccctgagaggcatgtgcacaggctggagtgcaatggcgtgatcttcactcaccgcaacctctgccttccaggtggtaaaaccaagactgagaatgaggaaaaaactgcacagctaaacatttctaaagaatcagagtcccacagactgatagtggagggactgctgatggacgttccccagcaccctgacttcaaggacaggttagagaagtcacagctacatgatacagggaataaaacaaagataggggattgcacagatttgacagtccaggatcatgaatcttccaccactgaaagggaggagatagccaggaaattggaagaaagtagtgtcagcacacatctcattacaaagcagggttttgccaaagaacaggtgttttataaatgtggtgagtgtggcagttactacaacccacattcagactttcacctgcatcagagagttcacactaatgagaagccctacacatgcaaagaatgtgggaaaaccttcagatataactcaaaactgtcacggcatcagaaaatccacactggagagaaaccatactcatgtgaggaatgtggacaagccttcagtcaaaattcccaccttcttcagcatcagaagctccatggtggacagaggccctatgaatgtactgactgtggtaaaaccttcagttataattcaaaactgattcggcatcagagaatccatactggggagaagccctttaaatgtaaggaatgtgggaaagccttcagttgtagctatgactgcatcatccatgaacgaattcacaatggggagaagccctatgaatgtaaggagtgtgggaagagtttgagttctaattcagttctgattcagcatcagagaatccacactggggagaaaccttatgaatgtaaagagtgtggcaaggccttccaccgcagttcggtatttcttcagcaccagaggttccacactggggaacaactctacaaatgtaatgaatgttggaaaactttcagctgtagctcccgcttcatagtgcatcagagaatccacaatggggagaaaccctatgaatgccaggaatgtgggaagacattcagtcaaaagatcactctggttcagcatcagcgagttcacactggggagaaaccttatgagtgtaaggagtgcgggaaagccttcagatggaatgcaagtttcatccagcatcagaagtggcatactaggaagaaactcatcaatggaacagggctatccgcagttaagccctactgtccctgcgccatcctctctcctctgcctccccaacatacctgctctgccctagccccaccagggcctcccttatcttcttcacatgcagtggtacttcctccctctgtgcctttcttcctgctgcttccctcatctgaaaaggccaacccttcacctgtccaaatagcacatttttttcaggatctcgcttttcctgggaagtcatcccttcagagcccgaatcctttgtctcactccctgtaa

SEQ ID NO: 48155 - DNA, 1325 bp, Homo Sapiens
ctcgatcagcccgccggctccggagcggctctgccttcccgagcgcgggacgcggcgccctgggggaggagggcgaagcgacgcggcgatggctccgcgggcactcccggggtccgccgtcctagccgctgctgtcttcgtgggaggcgccgtgagttcgccgctggtggctccggacaatgggagcagccgcacattgcactccagaacagagacgaccccgtcgcccagcaacgatactgggaatggacacccagaatatattgcatacgcgcttgtccctgtgttctttatcatgggtctctttggcgtcctcatttgccacctgcttaagaagaaaggctatcgttgtacaacagaagcagagcaagatatcgaagaggaaaaggttgaaaagatagaattgaatgacagtgtgaatgaaaacagtgacactgttgggcaaatcgtccactacatcatgaaaaatgaagcgaatgctgatgtcttaaaggcgatggtagcagataacagcctgtatgatcctgaaagccccgtgacccccagcacaccagggagcccgccagtgagtcctgggcctttgtcaccaggggggacgccagggaagcacgtctgtggccatcatctgcatacggtgggcggtgttgtcgagagggatgtgtgtcatcggtgtaggcacaagcggtggcactttataaagcccactaacaagtccagagagagcagaccacggcgccaaggcgaggtcacggtcctttctgttggcagatttagagttacaaaagtggagcacaagtcaaaccagaaggaacggagaagcctgatgtctgttagtggggctgaaaccgtcaatggggaggtgccggcaacacctgtgaagagagaacgcagtggcacagagtagcagtgtcctgaatgacagctcatctacacagagtgaaactccagatatgtgacaagcagcatgggacagatgctgacaatcagaacagatgctggatgtaaacaactggtaaggctgcactggtgcatgctggcagaatcacctgctatgcatccagggagcaaatgcatctgcatgctcagcatgacaccagcttacctccctgtgcaaatcccctcccctaatcagtctcatccaaatcttctcctgcagtagcagcttctaaagctgcaagggcctccgccaccgctgcatcctcgtccacaatctccccatccccatctccatcggagccatgggtatcctcctgcctgtttcctgagtcaaccacaggcatggcatgaacaggacccttctcattaaagcagatgcttagaacttc

SEQ ID NO: 48156 - DNA, 558 bp, Homo Sapiens
atcagagaccagaggaacagagaagaggccccagagcaaggcaaggaacggccaaggcaccaggacatggatgcagtggagccagggggacgtggctgggccagcatgttggcgtgcaggctttggaaagccatcagcagggcgctgtttgcagagttcctggccacggggctgtatgtgttctttggcgtgggctcagtcatgcgctggcccacagcacttccctccgtgctacagattgccatcaccttcaacctggtcaccgccatggctgtgcaggtcacctggaaggccagcggggcccacgccaaccccgccgtgacgctggccttcctcgtaggctcccacatctctctgccccgtgctgtggcctatgtggctgcccagctggtgggggccacggtgggggctgctctgctttatggggtcatgccgggagacatccgagagacccttgggatcaacgtggctccacccacgtcctctgctctccgactgttcccaagttcttccctccacctcgaggcctgcctcactcgccccttctccatttcgtaa

SEQ ID NO: 48157 - DNA, 330 bp, Homo Sapiens
ggtgtgctgaagaagactactggtcctgtgagattggctgtatgtgagaatccacatgagaggctaagaatattgtacacaaagatccttgatgttcttgagcaaatccctaaaaatgcagcatataaaaagtgtacagaacagattacaaatgagaagctagctatgcttaaagtagaaccagatgttaaaaaattagaagaccaacttcaagatggccaaatagaagaggtgattcatcaggctgaaaatgaactaaatgtggtgagaaaaacgatgcagtggaaaccatggggggcaatagtggaagagcctcctgccaatcagtga

SEQ ID NO: 48158 - DNA, 744 bp, Homo Sapiens
actgcctgcagaaccccagcccgactttccctgcgcactgggatcctgctggaacctcagctgcaacatgagctccgcagccaggtcccgcctcacccgcgccacccgccaggagatgctgttcttggcgttgctgctcctgccagttgtggtcgccttcgccagagctgaagctgaagaagatggggacctgcagtgcctgtgtgtgaagaccacctcccaggtccgtcccaggcacatcaccagcctggaggtgatcaaggccggaccccactgccccactgcccaactcatagccacgctgaagaatgggaggaaaatttgcttggatctgcaagccctgctgtacaagaaaatcattaaggaacatttggagagttagctactagctgcctaagtgtgcactttcaatctaactgtgaaagaatcttctgatgtttgtattatccttcttatattatattaacgaaataaatcaagttgtggtatagtcaatctatttcttaataatactgcaaaaataatgctgacacatcacaatttcatattttaaaatttccagaattttaagcaaaaagcattatgaaggaaggcttggtttaataaagactgattttgttcagtgttatatgttagctgatacatatttgttcatttatgtgattgcagtactttatagctacatatttaccttgaatgttacaattagcttgccaataaatattagtagctcttaagcattac

SEQ ID NO: 48159 - DNA, 213 bp, Homo Sapiens
actgctggccagacccccaagctagcccgccaggcctccatagagctgcccagcatggctgcatccagtaccaagagttggtgggagacgggtgaggtacaggctcagtctgcggccaagactccgtcctgcaaggatattgtggctggagacatgagcaagaaaagcctctgggagcagaagggaggctccaagacctcatcaacaattaag

SEQ ID NO: 48160 - DNA, 642 bp, Homo Sapiens
gtctctcgcaacaccctgtacgaggcggtgcgggaagtcctgcaccggaaccagcgcaagcgccgcaagttcctggagacggtggagttgcagatcagcttgaagaactatgacccccagaaggacaagtgcttctcgggcaccgtcagacttaagtccactccccgccctaagttgtgtgtgtgtgtcctgggggaccagcagcactgtgacgaggctaaggccgtggatatcccccacatggacatcgaggcgctgaaaaaactcaaaaagaataaaaaactggtcaagaagctggccaagaagtatgatgcgtttttggcctcagagtctctgatcaagcagattccacgaatcctcggcccaggtctaaataaggcaggaaagttcccttccctgctcacacacaacgaaaacatggtggccaaagtgggtgaggtgaagtccacaatcaagttccaaatgaagaaggtgttatgtctggctgtagctgttggtcacgtgaagatgacagccgatgagcttgtgtataacattcacctggctgtcaacttcttggtgtcattgctcaagaaaaactggcagaatgtccgggccttatatatcgagagcaccatgggcaagccccagcgcctatattaa

SEQ ID NO: 48161 - DNA, 1290 bp, Homo Sapiens
atgttcacagccattgatgaacccttgtatgagcagaagttgagtgtgcataccaagagtctacaagaagagcgccaacagtggacagctagctttcctcacctcaggattctaggtaggcagataatcattccaagtgaaggttatagattgtatcctagatccccttctgctgtttcagcttcatatgaaacaaccttgtctcaagaaagagattctactatatttggtataaggggaaagaagttacatttttcatcttcgtatgctcataaagcatcttctattgccaaatcctccagcttttcttttatggaaagagacgaggaagactctataatcatctccgaaggaataattgaggaatacctagcattcgattgcacagatatggaagagggatttcatgggaagaaatcagaagcagctacagagaaacagaaattagggtatcctcccattgctccattttactgcatgaaagaagatgtccttgtttatgtgtttgacaatgtatggagcaaggttgtgagctgtatggagcagttgacacgtagtcactgggaaggatttgcccaccatgatgagagtaatgttgcagttaccagacccgtttcagaaagtttctgtgtgctgagtgagccacatcctttggtgttaccacgagtgccacagtctaaggtgctgtccgttacctcaaatccaatgagtctctgtcaagcaagtagtcatcagccaaatgttaatggtctcttggtttatgggatgcctctacagccaagaaatctctccctaatggacaagctcctagatcttgatgacaagctacttatgaggcctgggtccagtaccatcctttcaactcgaaattggccaaatcgagctgtggagtttacatcatctctgtcatacacagtgcagtccaccaagagacgcaatccatcgccacgaacccttcatccgatcagcacaagccattcacgtgctggaataccaagacttgtggaagaaatcctcagaggagcccgagtcccagcggcagccaactggctctcctctccctcaccaatgtccctgagtcgaaataatctgctaccacctactagcacagctgaagtggaacttgtgagcactgtggggccacaaagacagacggagccccgtggcgactccagtcgagctccaagtgtggtggtggatgaacttaactatcagcagccacaagaaaggctccttttgcccaactttttctccaggcccaacacaactcaatcatttttggtagagtga

SEQ ID NO: 48162 - DNA, 663 bp, Homo Sapiens
atgtccatgggcctggagatcacgggcaccgcgctggccgtgctgggctggctgggcaccatcgtgtgctgcgcgttgcccatgtggcgcgtgtcggccttcatcggcagcaacatcatcacgtcgcagaacatctgggagggcctgtggatgaactgcgtggtgcagagcaccggccagatgcagtgcaaggtgtacgactcgctgctggcactgccacaggaccttcaggcggcccgcgccctcatcgtggtggccatcctgctggccgccttcgggctgctagtggcgctggtgggcgcccagtgcaccaactgcgtgcaggacgacacggccaaggccaagatcaccatcgtggcaggcgtgctgttccttctcgccgccctgctcaccctcgtgccggtgtcctggtcggccaacaccattatccgggacttctacaaccccgtggtgcccgaggcgcagaagcgcgagatgggcgcgggcctgtacgtgggctgggcggccgcggcgctgcagctgctggggggcgcgctgctctgctgctcgtgtcccccacgcgagaagaagtacacggccaccaaggtcgtctactccgcgccgcgctccaccggcccgggagccagcctgggcacaggctacgaccgcaaggactacgtctaa

SEQ ID NO: 48163 - DNA, 1293 bp, Homo Sapiens
gcgtccctctttccacaggaggaagttcactatggctccagtcccctggccatgctgacggcagcgtgcagcaaatttggtggctctagccctctgcgggactcaacaactctgggcaaagcaggcacaaagaagccgtactctgtgggcagtgacctttcagcctccaaaaccatgggggatgcttatccagccccctttacaagcactaatgggctcctttcacctgcaggcagtcctccagcacccacctcaggctatgctaatgattaccctcccttttcccactcattccctgggcccacaggcacccaggaccctgggctactagtgcccaaggggcacagctcttctgactgtctgcccagtgtctacacctctctggacatgacacacccctatggctcctggtacaaggcaggcatccatgcaggcatttcaccaggcccaggcaacactcctactccatggtgggatatgcaccctggaggcaactggctaggtggtgggcagggccagggtgatgggctgcaagggacactgcccacaggtccagctcagcctccactgaacccccagctgcccacctacccatctgactttgctccccttaatccagccccctacccagctccccacctcttgcaaccagggccccagcatgtcttgccccaagatgtctataaacccaaggcagtgggaaatagtgggcagctagaagggagtggtggagccaaacccccacggggtgcaagcactgggggtagtggtggatatgggggcagtggggcagggcgctcctcctgcgactgccctaattgccaggagctagagcggctgggagcagcagcggctgggctgcggaagaagcccatccacagctgccacatccctggctgcggcaaggtgtatggcaaggcttcgcacctgaaggcccacttgcgctggcacacaggcgagaggcccttcgtctgcaactggctcttctgcggcaagaggttcactcgttcggatgagctggagcgtcatgtgcgcactcacacccgggagaagaagttcacctgcctgctctgctccaagcgctttacccgaagcgaccacctgagcaaacaccagcgcacccatggagaaccaggcccgggtccccctcccagtggccccaaggagctgggggagggccgcagcacgggggaagaggaggccagtcagacgccccgaccttctgcctcgccagcaaccccagagaaagcccctggaggcagccctgagcagagcaacttgctggagatctga

SEQ ID NO: 48164 - DNA, 411 bp, Homo Sapiens
gacgacctgaggtatggagtgtatcctgtcaagggggcaagtggataccctggggctgagaggaatcttctggagtactcttattttgaaaaggggccgttgacatttagggatgtggtcatagaattctctcaggaggagtggcaatgcctggacactgctcagcaagatttgtataggaaagtgatgttagagaacttcagaaacctggtgttcttgggtattgatgtctctaagccagatctgatcacctgtctggagcaaggaaaagatccctggaatatgaagagacacagtatggtagccacacccccagaaagtggggtattgaaatttcctactataattatattgctgtctaggtgtttcttccagtctgtcaatatttgctttatatatttggaaccttag

SEQ ID NO: 48165 - DNA, 1804 bp, Homo Sapiens
gcaatttaagtaaaacaagatgaagcaggaaccgactctcaccatccccactcccacctccatgaattccatcggacagttgtgcgaaagcgggctggctttcgcacaaccattggtggactgtctgtcctgtaagccccccaggggctgatgccctcccagtctgcctgccctgttcttagcacagcccctggcaccccgtgtgatctcaggaaacacttgctaaacatggtatcggaggagaaacggagcccacagcttagtgcaaagacctggcggcgtggactgaggctgcagaaacgcagaaacgcgcttttcctgccagaaggggacatctgcgtggtcgggagtacctctggggcacgtgccctaattccagaaacatctaagctggagcgcagtggcactgtaatagcttactgcaaccttgaactcctggcttcaagtgatcctcccgtctgggcctcccaaagcactgggatgacaggtatgagctaccgctctcagccacaactgggttttaagagcactcctccagcccactccagtgtcttccatcattctgtgaaagcaccaaaagaggaccaagcccaggaagccgccagcaggcctctcaccagccaagatggctggaatcctaatatcaagaaatgaaactccagcaggccatggaaatgctaaggggttggcatttctgctctagagagagccaaagagaaagctctatttatatctccttgcgtttggtcgcagcctcatcaaccaaaagaaccttccgccccactcaacacatcaatcaaattggggagggggtgtgaacagcagcagcgggtgttacagaggagtctcaagggtatcttagagggtgcctctctgaacagtcgtcccctccaaatcccccccaagagaattactaggacattctccttcccccgcaagcaacggcacccccagatgattaaacgcgctggcgtcggaaagagctgggatcctggagaaactacttgtaaactgtgtgggttggtgagttatttaacttttctgagccttcgtttccttaactgtaaaatgaagacaacaccactcagctcctacagttgtccagctgaaatcacctaggtaagaacgaccagttctttggggagtaatgtcccgatggtaccattcaattgtcaagaacaccaaggcaccgtcaggcacccgggcggtatcccactctcctggaagagagcagggggttagcccttggtttcaaagtccctagggagcagtaaaccttcccctccgagagccctgagagaggaataattgccccttcccactccaacccacggcacacccgcccacatccacgtgcggctgtgcccagcatctcagaggtaggacttctcaggaatcggcgggaagaagcccccttgatggagtctggtggggttcaagatctgcaggtcccaccttccagggaacacctgcacaagtgagacctgcccgatcagccccgcgctccatccgcaaactgggcagatcccaagggtgccacgcgaggaccctgcaccttggccgctccagggcgccccccacccgcgaccccggaaatctcgcccctacctgcttcaccctcgccccacccacagcgcacttttcgggacctcccagcggcccttccccggttctctggacccccgtctccccgccctgcaacgcccccatcctggtgcccacgaaaggtcgtcccagttcccctcttctctacctcaaaggaggaggtgcaaatgaggaagcctaaataaaaacaggaaactcg

SEQ ID NO: 48166 - DNA, 684 bp, Homo Sapiens
atgttggtggacttcctctctgagaagaaggtaatctcctacagaggctgcatcactcagctctttttcttgcacttccttggaggaggggagggattactccttgttgtgatggcctttgaccgctacatcaccatctgcctgcctctgcagtattcaactgtcatgaactctagagcctgctatgcaatgatgttggctctgtggcttgggggttttgtccactccattatccaggtggtcctcatcatccgcttgcctttttgtggcccaaaccagctggacaacttcttctgtgatgtccgacaggtcatcaagctggcttgcaccgacatgtttgtggtggagcttctgatggtcttcaatagtggcctgatgacactcatgtgctttctgggacttctggcctcctatgcagtcattctttgtcgcatacgagcgtcttcttctgaggcaaaaaacaaggccatgtccacatgcaccacccatatcattgttatattcttcatgtttggacctggcatcttcatctacacgtgccccttcagggctttcccagccgacaaggtggtttctctcttccacacagtgattcttcctttgttgaatcctgtcatttatacccttcataaccaggaagtgaaagcttccatgaaaaaggtgtttaataaacacatagcctga

SEQ ID NO: 48167 - DNA, 945 bp, Homo Sapiens
atgtcagcctccaatatcaccttaacacatccaactgccttcttgttggtggggattccaggcctggaacacctgcacatctggatctccatccctttctgcttagcatatacactggccctgcttggaaactgcactctccttctcatcatccaggctgatgcagccctccatgaacccatgtacctctttctggccatgttggcagccatcgacctggtcctttcctcctcagcactgcccaaaatgcttgccatattctggttcagggatcgggagataaacttctttgcctgtctggcccagatgttcttccttcactccttctccatcatggagtcagcagtgctgctggccatggcctttgaccgctatgtggctatctgcaagccactgcactacaccaaggtcctgactgggtccctcatcaccaagattggcatggctgctgtggcccgggctgtgacactaatgactccactccccttcctgctgagatgtttccactactgccgaggcccagtgatcgctcactgctactgtgaacacatggctgtggtgaggctggcgtgtggggacactagcttcaacaatatctatggcatcgctgtggccatgtttattgtggtgttggacctgctccttgttatcctgtcttatatctttattcttcaggcagttctactgcttgcctctcaggaggcccgctacaaggcatttgggacatgtgtctctcatataggtgccatcttagccttctacacaactgtggtcatctcttcagtcatgcaccgtgtagcccgccatgctgcccctcatgtccacatcctccttgccaatttctatctgctcttcccacccatggtcaatcccataatctatggtgtcaagaccaagcaaatccgtgagagcatcttgggagtattcccaagaaaggatatgtag

SEQ ID NO: 48168 - DNA, 1603 bp, Homo Sapiens
atctccccctcccaaaatcgctccattacataaatcggggggggtgcaggaggggggtcccttccgatcctccctcctgacgccccccccagcagccccctcccccaccattgaaagccatgaattttgaatttgagagggagattgggtttataaacagccagccgtcgctcgccgagtgtctgacttccttccccgctgtcttggagacatttcaaacttcatcaatcaaggagtcgacattaattcctcctcctcctcctttcgagcaaaccttccccagcctccagcccggcgcctccacccttcagagacccaggagccaaaagcgagccgaagatgggcctgctctgccgccgccaccgccgccgccactccccgctgcccccccggcccccgagttcccttggatgaaagagaagaaatccgccaagaaacccagccaatccgccacgtctccttctccggccgcctccgccgttccggcctccggggtcggatcgcctgcagatggcctgggactgccggaggctggtggcggcggggcgcgcaggctgcgcacggcttacaccaacacgcagctgctggaactggagaaggaattccactttaataagtacctgtgccggccacgccgcgtcgagatcgcggccttgctggacctcaccgaaaggcaggtcaaagtctggtttcagaaccggcgcatgaagcacaagcggcagacgcagcaccgagagccgccggatggggagcctgcctgcccgggagccctggaggacatctgcgaccctgccgaggaacccgcggccagcccgggcggcccctccgcctcgcgggcggcgtgggaagcctgctgtcacccgccggaggtggtgccgggggccttaagcgcggacccccggcctttagccgttcgcttagagggcgcaggcgcgtcgagtcccggctgcgcgctgcgcggggccggcgggctggagcccgggccattgccagaagacgtcttctcggggcgccaggattcacctttccttcccgacctcaacttcttcgcggccgactcctgtctccagctatccggaggcctctcccctagcctacagggttctctcgacagcccggtccctttttccgaggaagagctggattttttcaccagtacgctctgtgccatcgacctgcagtttccctaacctgtttcctcctcccggtcctttcgacccccgcgctccttggccgtctactggaaaaatcgagcctctcccaccctcagtcgcatagacttatgtgttttgctaaaattcaggtattactgaattagcgtttaatccactccctttcttcttcttctaaaatattgggcactcggttatcttttaaaattcacacagaaaaattccgtttggtagactccttccaatgaaatctcaggaataattaaactctagggggactttcttaaaaataactagagggacctattttcctcttttttatgttttagactgtagattatttattaaaattctttaataataggaaaaggggaaagtatttattgtacattattttcatagattaaataaatgtctttataataccaaaa

SEQ ID NO: 48169 - DNA, 330 bp, Homo Sapiens
gagaccgagacggcgccgctgaccctagagtcgctgcccaccgatcccctgctcctcatcttatcctttttggactatcgggatctaatcaactgttgttatgtcagtcgaagacttagccagctatcaagtcatgatccgctgtggagaagacattgcaaaaaatactggctgatatctgaggaagagaaaacacagaagaatcagtgttggaaatctctcttcatagatacttactctgatgtaggaagatacattgaccattatgctgctattaaaaaggccgggatgatctcaagaaatatttggagcccaggtgtcctcggatgg

SEQ ID NO: 48170 - DNA, 246 bp, Homo Sapiens
atgtgtagccgggaggtcaccacgctgcagggccttggaaccacttctgcctccgaggagtcccttactgatgatcataggctcctcaaggtcatcagccagggcagctttgcagaagtcaaggcagctggcccagcacattctcactgggaccaagatggctgtggaggtcaccccaacagggcagcagggctcctgcagcccccagggtctgtactgcagggaccatatgatgaaggcccttaa

SEQ ID NO: 48171 - DNA, 873 bp, Homo Sapiens
ctcactggagctgaagggctggtagtcaggccgaatctcgcgagaattggaactatttcagagccagaggaggatagtggcggcggcgaactttgcccggtagattttactgactggggtgctggcgcgcgcctttttctcggccagaatccagttattgggatagtcttgacttctacctcagcccaacttctgtggtcgtaatattagtttagcttgggtttgccgtgaagtaagaagactgacttccgcaaaggtactgaacgactgggtgtaggtgccagggcatggacgtgaagctggaaccgcgaaatgagttagttgtgggccgctggcctcaaggagcgaacgtcagcgcgaagaggagaagcttgtgcatacgctctgataagggttttaatagaggtattaccacagtgctgcgtgacacggttgagagagtggtcagaagaagctaatgaaaggaattgaagcagtgccttaggggagtaggagtacttttggagatagcaaaggactttctaggcaaagtggaagtcaaagcacggatgcctgaaaattcatagtgtgatagtgcagtgagtaatgtatctagagaaggggtcttaaacccagatgcctagactggcgagagaaaataaattatcttatgcaagctgagcctaaacaaatggtggaagttactacgatggataagtgagcattaagttcatctgaaaggagaatttgatacccaaatccaacccatttctctaggagaatgagcacccagtttctgagatgtcttcgtttctcaggaaaatccagaaatcctgggttttatgtgaaacttaatttataagtgttgctaactaattaaaattcaaaaatgtc

SEQ ID NO: 48172 - DNA, 197 bp, Homo Sapiens
agtcctcgcgggggttccgagggggcctgagattttgaggagtggaagccggaggctcgggtcctaatcaccccggagggcctgctgcaggcatatgttagcgcttcccaacctcaagggccccaggagctttcctgaaaaaccctcctgtgaagtgtggcggtcagccaggtttggaatcgaagcctcttaaaatg

SEQ ID NO: 48173 - DNA, 1809 bp, Homo Sapiens
atggcactgcctgcgtgtgcagtccgggagttcgagccgccgcggcaaccggagcgaggagcgcccgtccgcaccacctgtccccgccggcattccagagtagaggccgaattggcagcgagccggcccgggtcggtcgccgcctcagttcgcgcgggccctcctaggggtgtgtctcacggattccacacccggccgctcctggacaagccccgaaaggcgtcttcttccctggcgggagccgcgtgcgccccgcttttcgcgctgctgtcccgggggcgccgcaggcggatgcacgttctcaggcgacgctgggacggctccctctgccgggccctgctcactcggggcctggccgccctgggccactcgctgaaccacgtgctccgtgcgatcttctccaaattcggccccatggccagcgtcgggaacatggatgagaaatccaacaagctgctgctagctttggtgatgctcttcctatttgccgtgatcgtcctccaatacgtgtgccccggcacagaatgccagctcctccgcctgcaggcgttcagctccccggtgccggacccgtaccgctcggaggatgagagctccgccaggttcgtgccccgctacaatttcacccgcggcgacctcctgcgcaaggtagacttcgacatcaagggcgatgacctgatcgtgttcctgcacatccagaagaccgggggcaccactttcggccgccacttggtgcgtaacatccagctggagcagccgtgcgagtgccgcgtgggtcagaagaaatgcacttgccaccggccgggtaagcgggaaacctggctcttctccaggttctccacgggctggagctgcgggttgcacgccgactggaccgagctcaccagctgtgtgccctccgtggtggacggcaagcgcgacgccaggctgagaccgtccaggaacttccactacatcaccatcctccgagacccagtgtcccggtacttgagtgagtggaggcatgtccagagaggggcaacatggaaagcatccctgcatgtctgcgatggaaggcctccaacctccgaagagctgcccagctgctacactggcgatgactggtctggctgccccctcaaagagtttatggactgtccctacaatctagccaacaaccgccagcgcatgctctccgacctgaccctggtaggctgctacaacctctctgtcatgcctgaaaagcaaagaaacaaggtccttctggaaagtgccaagtcaaatctgaagcacatggcgttcttcggcctcactgagtttcagcggaagacccaatatctgtttgagaaaaccttcaacatgaactttatttcgccatttacccagtataataccactagggcctctagtgtagagatcaatgaggaaattcaaaagcgtattgagggactgaattttctggatatggagttgtacagctatgccaaagacctttttttgcagaggtatcagtttatgaggcagaaagagcatcaggaggccaggcgaaagcgtcaggaacaacgcaaatttctgaagggaaggctccttcagacccatttccagagccagggtcagggccagagccagaatccgaatcagaatcagagtcagaacccaaatccgaatgccaatcagaacctgactcagaatctgatgcagaatctgactcagagtttgagccagaaggagaaccgggaaagcccgaagcagaactcaggcaaggagcagaatgataacaccagcaatggcaccaacgactacataggcagtgtagagaaatggcgttaa

SEQ ID NO: 48174 - DNA, 807 bp, Homo Sapiens
ctggaggcagtatcccatacctctgacatgcaccgtggatatggagataagtacttgaagatcagtaaagagattggggaagacgtgcagaaagatgtggagatggtacacacagttttgaagttggacaaaacggggcctgtgacaaaagaactgagtggactgccatctggaccctctgctggatcagctactcctcccccaccaccaggcccccctcctccactagtctctgtcagttcaggctcagatgagtccgcttccctctcagcactgtttgcgcagattaatcagggggagagcatcacacatgccctgaaacgtgtatctgatgacatgaagactcacaagaaccctaccctgaaggctcagagtggtccagtacgcagtggccccaagccattctctgcacctaaaccccaaaccagcaagaaggagccagctgtacttgaactggagggcaagaagtggagagtggaaaatcaggaaaatgtttccaatctggtgattgatgacacagagctgaaacaggcggcttacatatacaagtgtgtcaacacgatgttgcaaatcaagggcaaaattaactccattacagtagataattttcaggtgatgagtaaagtgccaaccatttccatcaacaaaacagatggctgccatgcttacctgagcaagaattccctggattgtgaaatagccagtgccaaatcttctgagatgaatgtcctcattcctacagaaggcggtgactttaatgaattcccagttcctgagcagttcaagaccctctggaatgggcagaag

SEQ ID NO: 48175 - DNA, 3568 bp, Homo Sapiens
agaatgtcatcctcaagggaagtgcagagagatttcttcagtcctcagctgagtataagctggcctcctggagtctgtgaacacaaacgtccaatgtgagtgtgcctgtgcaagcccctggctgtttatactccggagggtgtccccgtgcgtcatcggtggagtggaccaaaactggtgatctgtttgccctgtgtgaccttgcccagaaccctgctgactgagagaacacatctgctggaagtcctctgggattcaaggtacaggggaactcgaggcctcactgaaacggaaagcaaatacaaagaaactttattttaaaaacatgtcttggtctcccaagaagagggcaattggattgctcagccaggaatgaagagtagttttacagaaaaaagaggacaatattgggatcacctttgacctttccatttggaaataatattttctattgtgttatagaaaggtgggaagctttcatccagaacaagtaatgaatttcataaaggacaatagccgagcccttattcaaagaatgggaatgactgttataaagcaaatcacagatgacctatttgtatggaatgttctgaatcgcgaagaagtaaacatcatttgctgcgagaaggtggagcaggatgctgctagagggatcattcacatgattttgaaaaagggttcagagtcctgtaacctctttcttaaatcccttaaggagtggaactatcctctatttcaggacttgaatggacaaagtctttttcatcagacatcagaaggagacttggacgatttggctcaggatttaaaggacttgtaccataccccatcttttctgaacttttatccccttggtgaagatattgacattatttttaacttgaaaagcaccttcacagaacctgtcctgtggaggaaggaccaacaccatcaccgcgtggagcagctgaccctgaatggcctcctgcaggctcttcagagcccctgcatcattgaaggggaatctggcaaaggcaagtccactctgctgcagcgaattgccatgctctggggctccggaaagtgcaaggctctgaccaagttcaaattcgtcttcttcctccgtctcagcagggcccagggtggactttttgaaaccctctgtgatcaactcctggatatacctggcacaatcaggaagcagacattcatggccatgctgctgaagctgcggcagagggttcttttccttcttgatggctacaatgaattcaagccccagaactgcccagaaatcgaagccctgataaaggaaaaccaccgcttcaagaacatggtcatcgtcaccactaccactgagtgcctgaggcacatacggcagtttggtgccctgactgctgaggtgggggatatgacagaagacagcgcccaggctctcatccgagaagtgctgatcaaggagcttgctgaaggcttgttgctccaaattcagaaatccaggtgcttgaggaatctcatgaagacccctctctttgtggtcatcacttgtgcaatccagatgggtgaaagtgagttccactctcacacacaaacaacgctgttccataccttctatgatctgttgatacagaaaaacaaacacaaacataaaggtgtggctgcaagtgacttcattcggagcctggaccactgtggagacctagctctggagggtgtgttctcccacaagtttgatttcgaactgcaggatgtgtccagcgtgaatgaggatgtcctgctgacaactgggctcctctgtaaatatacagctcaaaggttcaagccaaagtataaattctttcacaagtcattccaggagtacacagcaggacgaagactcagcagtttattgacgtctcatgagccagaggaggtgaccaaggggaatggttacttgcagaaaatggtttccatttcggacattacatccacttatagcagcctgctccggtacacctgtgggtcatctgtggaagccaccagggctgttatgaagcacctcgcagcagtgtatcaacacggctgccttctcggactttccatcgccaagaggcctctctggagacaggaatctttgcaaagtgtgaaaaacaccactgagcaagaaattctgaaagccataaacatcaattcctttgtagagtgtggcatccatttatatcaagagagtacatccaaatcagccctgagccaagaatttgaagctttctttcaaggtaaaagcttatatatcaactcagggaacatccccgattacttatttgacttctttgaacatttgcccaattgtgcaagtgccctggacttcattaaactggacttttatgggggagctatggcttcatgggaaaaggctgcagaagacacaggtggaatccacatggaagaggccccagaaacctacattcccagcagggctgtatctttgttcttcaactggaagcaggaattcaggactctggaggtcacactccgggatttcagcaagttgaataagcaagatatcagatatctggggaaaatattcagctctgccacaagcctcaggctgcaaataaagagatgtgctggtgtggctggaagcctcagtttggtcctcagcacctgtaagaacatttattctctcatggtggaagccagtcccctcaccatagaagatgagaggcacatcacatctgtaacaaacctgaaaaccttgagtattcatgacctacagaatcaacggctgccgggtggtctgactgacagcttgggtaacttgaagaaccttacaaagctcataatggataacataaagatgaatgaagaagatgctataaaactagctgaaggcctgaaaaacctgaagaagatgtgtttatttcatttgacccacttgtctgacattggagagggaatggattacatagtcaagtctctgtcaagtgaaccctgtgaccttgaagaaattcaattagtctcctgctgcttgtctgcaaatgcagtgaaaatcctagctcagaatcttcacaatttggtcaaactgagcattcttgatttatcagaaaattacctggaaaaagatggaaatgaagctcttcatgaactgatcgacaggatgaacgtgctagaacagctcaccgcactgatgctgccctggggctgtgacgtgcaaggcagcctgagcagcctgttgaaacatttggaggaggtcccacaactcgtcaagcttgggttgaaaaactggagactcacagatacagagattagaattttaggtgcattttttggaaagaaccctctgaaaaacttccagcagttgaatttggcgggaaatcgtgtgagcagtgatggatggcttgccttcatgggtgtatttgagaatcttaagcaattagtgttttttgactttagtactaaagaatttctacctgatccagcattagtcagaaaacttagccaagtgttatccaagttaacttttctgcaagaagctaggcttgttgggtggcaatttgatgatgatgatctcagtgttattacaggtgcttttaaactagtaactgcttaa

SEQ ID NO: 48176 - DNA, 606 bp, Homo Sapiens
atgtacacgctgctgtcgggcttgtacaagtacatgtttcagaaggacgagtactgcatcctgatcctgggcctggacaatgctgggaagacgaccttcctggagcagtcgaaaacccgatttaacaagaactacaaggggatgagtctatccaaaatcaccaccaccgtgggcctaaacatcggcactgtggatgtgggaaaggctcggctcatgttctgggacttaggagggcaggaagagctgcagtctttgtgggacaagtattatgcggagtgtcacggcgtcatctacgtcattgactccaccgacgaggagaggctggctgagtccaagcaggcgtttgagaaggtggtgaccagcgaggcgctgtgcggtgtccccgtcttggtgctggccaacaagcaggatgtggagacgtgcctctcaatccctgacatcaagacggccttcagcgactgcaccagcaagatcggcaggcgagattgcctgacccaggcctgctcggccctcacaggcaaaggggtgcgcgagggcatcgagtggatggtgaagtgtgtcgtgcggaatgtgcaccggccgccgcggcagagggacatcacgtag

SEQ ID NO: 48177 - DNA, 1423 bp, Homo Sapiens
agggagcctcggaagcagggcctggccggcagagcacacctgctgtcaccagggaccacaggcagcatgaagacccccgtggagctggccgtcagtgggatgcagaccctcggccttcagcaccgctgccgaggtggctaccgggtcaaggccaggacgtcatatgtggatgagactctgtttggcagcccagcaggcacccggcctaccccaccggacttcgatccgccctgggtggagaaggctaacagaaccagaggcgtgggcaaggaggcatcgaaggccttgggggcaaaggggagctgtgagaccaccccctcaaggggcagcacccccaccctcacaccaaggaagaagaacaaatacagacccatcagccacaccccgtcttactgtgatgagtcgctgtttggctcccgatctgaaggcgccagcttcggggccccgcggatggcgaagggggatgccgcaaagctccgtgctctcttgtggacgccaccacctacccccaggggtagccactcgccccgccccagggaggcaccactgcgagccattcacccagctggtccctccaagacagagccggggccagcggcagactcccagaagttatctatgggtgggttacactcttcacgccccctgaagcggggactttcccattccctcacccacctgaatgtccccagcactggtcatccagccaccagtgccccccacacaaatgggcctcaggatctcaggccttccacgtcaggggtgaccttccggagccccctggtgacttccagggctcgctcagttagcatttcagtgccatctaccccacgacgaggtggggccacccagaaaccaaagcccccttggaaatgatactctttcatcagggttgcctatggggccacggcgacaggtatggccccttgccagggtaggaggacattcatcacccagggaaccccaggtattaaagaagcccctgtgggggcagacagacatagcaggggtgggcagtgcctccctttatcctgacaatctctagtcgattcttgcctttttctcccgattgcggatttgggggccacctctaagatgcctctctccagccctgtctcaaccatactccaaattagtgccaacccaggggcctggcacctcccacatcatccattgtcttgctgccaagtgcgaataaacggcgtgattgccaacctggagggtcccctcttatcccttcaagccaagcttcctgctcaggattagtttccagctaagtctgcaagccctagaggagtttttccaggctgtctgtgaagcctggggaacacaacggcaactgggagatttgtgagtgaacactgtttcatcttaatatgcttctgaatttattttcatgtactaaatagatcagctcatcaaa

SEQ ID NO: 48178 - DNA, 3339 bp, Homo Sapiens
atgaggagggacgagcgagacgccaaagccatgcggtccctgcagccgccggatggggccggctcgccccccgagagtctgaggaacggctacgtgaagagctgcgtgagccccttgcggcaggaccctccgcgcggcttcttcttccacctctgccgcttctgcaacgtggagctgcggccgccgccggcctctccccagcagccgcggcgctgctcccccttctgccgggcgcgcctctcgctgggcgccctggctgcctttgtcctcgccctgctgctgggcgcggaacccgagagctgggctgccggggccgcctggctgcggacgctgctgagcgtgtgttcgcacagcttgagccccctcttcagcatcgcctgtgccttcttcttcctcacctgcttcctcacccggaccaagcggggacccggcccgggccggagctgcggctcctggtggctgctggcgctgcccgcctgctgttacctgggggacttcttggtgtggcagtggtggtcttggccttggggggatggcgacgcagggtccgcggccccgcacacgcccccggaggcggcagcgggcaggttgctgctggtgctgagctgcgtagggctgctgctgacgctcgcgcacccgctgcggctccggcactgcgttctggtgctgctcctggccagcttcgtctggtgggtctccttcaccagcctcgggtcgctgccctccgccctcaggccgctgctctccggcctggtggggggcgctggctgcctgctggccctggggttggatcacttctttcaaatcagggaagcgcctcttcatcctcgactgtccagtgccgccgaagaaaaagtgcctgtgatccgaccccggaggaggtccagctgcgtgtcgttaggagaaactgcagccagttactatggcagttgcaaaatattcaggagaccgtcgttgccttgtatttccagagaacagatgattctttgggattgggacttaaaacaatggtataagcctcattatcaaaattctggaggtggaaatggagttgatctttcagtgctaaatgaggctcgcaatatggtgtcagatcttctgactgatccaagccttccaccacaagtcatttcctctctacggagtattagtagcttaatgggtgctttctcaggttcctgtaggccaaagattaatcctctcacaccatttcctggattttacccctgttctgaaatagaggacccagctgagaaaggggatagaaaacttaacaagggactaaataggaatagtttgccaactccacagctgaggagaagctcaggaacttcaggattgctacctgttgaacagtcttcaaggtgggatcgtaataatggcaaaagacctcaccaagaatttggcatttcaagtcaaggatgctatctaaatgggccttttaattcaaatctactgactatcccgaagcaaaggtcatcttctgtatcactgactcaccatgtaggtctcagaagagctggtgttttgtccagtctgagtcctgtgaattcttccaaccatggaccagtgtctactggctctctaactaatcgatcacccatagaatttcctgatactgctgattttcttaataagccaagcgttatcttgcagagatctctgggcaatgcacctaatactccagatttttatcagcaacttagaaattctgatagcaatctgtgtaacagctgtggacatcaaatgctgaaatatgtttcaacatctgaatcagatggtacagattgctgcagtggaaaatcaggtgaagaagaaaacattttctcgaaagaatcattcaaacttatggaaactcaacaagaagaggaaacagagaagaaagacagcagaaaattatttcaggaaggtgataagtggctaacagaagaggcacagagtgaacagcaaacaaatattgaacaggaagtatcactggacctgattttagtagaagagtatgactcattaatagaaaagatgagcaactggaattttccaatttttgaacttgtagaaaagatgggagagaaatcaggaaggattctcagtcaggttatgtataccttatttcaagacactggtttattggaaatatttaaaattcccactcaacaatttatgaactattttcgtgcattagaaaatggctatcgagacattccttatcacaatcgtatacatgccacagatgtgctacatgcagtttggtatctgacaacacggccagttcctggcttacagcagatccacaatggttgtggaacaggaaatgaaacagattctgatggtagaattaaccatgggcgaattgcttatatttcttcgaagagctgctctaatcctgatgagagttatggctgcctgtcttcaaacattcctgcattagaattgatggctctatacgtggcagctgccatgcatgattatgatcacccagggaggacaaatgcatttctagtggctacaaatgcccctcaggcagttttatacaatgacagatctgttctggaaaatcatcatgctgcgtcagcttggaatctatatctttctcgcccagaatacaacttccttcttcatcttgatcatgtggaattcaagcgctttcgttttttagtcattgaagcaatccttgctacggatcttaaaaagcattttgattttctcgcagaattcaatgccaaggcaaatgatgtaaatagtaatggcatagaatggagtaatgaaaatgatcgcctcttggtatgccaggtgtgcatcaaactggcagatataaatggcccagcaaaagttcgagacttgcatttgaaatggacagaaggcattgtcaatgaattttatgagcagggagatgaagaagcaaatcttggtctgcccatcagtccattcatggatcgttcttctcctcaactagcaaaactccaagaatcttttatcacccacatagtgggtcccctgtgtaactcctatgatgctgctggtttgctaccaggtcagtggttagaagcagaagaggataatgatactgaaagtggtgatgatgaagacggtgaagaattagatacagaagatgaagaaatggaaaacaatctaaatccaaaaccaccaagaaggaaaagcagacggcgaatattttgtcagctaatgcaccacctcactgaaaaccacaagatatggaaggaaatcgtagaggaagaagaaaaatgtaaagctgatgggaataaactgcaggtggagaattcctccttacctcaagcagatgagattcaggtaattgaagaggcagatgaagaggaatag

SEQ ID NO: 48179 - DNA, 741 bp, Homo Sapiens
atgcggggacctctgcagggtcctgggctgcctctgtgcctctcagctgagtgggggatccaacgctcccaggctactgtgtccactgtggatggaggggtccggcctgaggggagtgtggggggcgtggtggggggaaaaggccaccaggaagcgctgctctgtggcaagggcggcagggagggggacacagctgcacaggtgcccatcgccagcggggctgggatcttcctgtggtgctccttggcccctgcgttctgcccgcctaagtggcccctccggctggtcctgagcatctgcttgctcagctctgtcctgggctgggctggtggcattgaggaggagctggctgggcgctgggctggaggtgagtgggacgaaggggtccccagggcaggtgctgccggtgaggaggagagtggcttctccgaggttgcagcgaaggacggccaggtctggagaggatgtggcctggccagtcctgacgccggagcccacgggccctttcccgtccacgtgctaggaaatggcaaacccatcagagccctgagggaaggcagcggagggcgcaggcgcctgcaggcctcgcgcacggggaccccacttcgcagctgggctttgcggctcctaaatatgcctgggacctgtcccgttgactttctctttcgaagtgcctttgagtgtctggcagccgtgactttctatcgggccgcctctctggccggcttcctgctgcaatga

SEQ ID NO: 48180 - DNA, 470 bp, Homo Sapiens
ggggacactggatcacctagtgtttcacaagcaggtaccttctgctgtaggagagagagaactaaagttctgaaagacctgttgcttttcaccaggaagttttactgggcatctcctgagcctaggcaatagctgtagggtgacttctggagccatccccgtttccccgccccccaaaagaagcggagatttaacggggacgtgcggccagagctggggaaatgggcccgcgagccaggccggcgcttctcctcctgatgcttttgcagaccgcggtcctgcaggggcgcttgctgcgttcacactctctgcactacctcttcatgggtgcctcagagcaggaccttggtctttccttgtttgaagctttgggctacgtggatgaccagctgttcgtgctggtctcgaactctcctgacctcgtgatccgcctgcctcggcctcccaaagtgctgagattacaggtgtga

SEQ ID NO: 48181 - DNA, 708 bp, Homo Sapiens
ggctccgccgcgctgggccgctgctgtcctggccgtgacccgatgtttgtcgcccgcgggcccccgcgctgcttctgcgaccaagcgtgcggcgcggcgcgggactgctgcgcagactatacgcgggtctgcccagcagtctcctgcactgtggcacagtggagtggctgcagtcgctgtgaaacctgccaggtctcctaccatgtacaccggaggcgtgtcctgcaggagccgaggaatgggggtgtccccttcccgctgctggaagagcgggctggctgtgtggagtactggagccaccagggagtggagtgccagcagtcattggtggggatgggccccaggggtggctctcagtgggaacagtcaggctggactgcagggccctccatgagttcttgggtagggtctgagtactgtgtccagttccagttggggtccattccagggagctgcgggcaggcgagggcaccccatgcccagtggacaaggtatctgagtcagggccacacggtctgtgtgaggagtgaatggcctgcccaggacaccaggagccggcgctgctacggggacggtggtggggccaaagggaacaagatgtggctgtggcaagcggccagccatccccggtgccgagggacctgggagaagctagggcagctccggcattgttcctgccctgtggtccacagcctcgtcttcatctag

SEQ ID NO: 48182 - DNA, 366 bp, Homo Sapiens
atggcagcaagatttcaaagaagattttgggggagagagcagggagtggctcagggaaagaagtggagtgttgagtcagttggcttaatgggaacctggtttgcccattttgaaaaccacaacggagaaataatcacccagatctactattttcaccttaaaacatcctggggcccgtcatcttgcaccctggctctgcagggcaggattggaaggtctctggggggccccgctcctctgaaggatcacctgccccacctgtcacattcctccctggccaggcctcacactaaagagactcgcctggctccaccaacacccactccagactctgtaggggggtatcagcagaaattgaatctttag

SEQ ID NO: 48183 - DNA, 1095 bp, Homo Sapiens
agcggccatgcgttccgggggccgcgggcgaccccgcctgcggctgggggaacgtggcctcatggagccactcttgccgccgaagcgccgcctgctaccgcgggttcggctcttgcctctgttgctggcgctggccgtgggctcggcgttctacaccatttggagcggctggcaccgcaggactgaggagctgccgctgggccgggagctgcgggtcccattgatcggaagcctccccgaagcccggctgcggagggtggtgggacaactggatccacagcgtctctggagcacttatctgcgccccctgctggttgtgcgaaccccgggcagcccgggaaatctccaagtcagaaaggcagccccggtgaccctgcaactgctcttcttggatggtgaagaggcgctgaaggagtggggacccaaggactccctttacggttcccggcacctggcccagctcatggagtctatacctcacagccccggccccaccaggatccaggctattgagctctttatgcttcttgatctcctgggagcccccaatcccaccttctacagccacttccctcgcacggtccgctggttccatcggctgaggagcattgagaagcgtctgcaccgtttgaacctgctgcagtctcatccccaggaagtgatgtacttccaacccggggagccctttggctctgtggaagacgaccacatccccttcctccgcagaggggtacccgtgctccatctcatctccacgcccttccctgctgtctggcacacccctgcggacaccgaggtcaatctccacccacccacggtacacaacttgtgccgcattctcgctgtgttcctggctgaatacctggggctctagcgtgcttggccaatgactgtggagaggactgtgagagagaaggtcccagcgggggccagtgaagctcaggcaggatctgcctagggtgtgctggtttgtccttttcatacctttgtctcctaattgtgctacaattggaagaccttctttcttttgattgtctcaagctgccacccttcaaggacagggaagagaccactgtgggatgacagccagaggaa

SEQ ID NO: 48184 - DNA, 1672 bp, Homo Sapiens
gtggcctttccaagcggctgccacctcaggcttgggtgctggggagggctccaggctgcctacatctcaccaccggagcctgagctgccggggctatgggcacagggtgccgggcagtctgggctctcgctgctgcccagcttctttccagcctggcgaatccatctgctcaggctggcacttctgcaaagcccggcagcacagtgtgtgaacagcgtggccacaaggcgggactgccggaccccccgacgcacgccatgttctggcagagcgtggcctgagctgctgctccgggcctcaccctcgcccgtgaggagcagatagcaggcacccacctcgggactgttggaagatggaacacgctaacgcataggcgcggctggaggcagcaccagagaaagacacagttgtgcggtgcttgcggacgaggacgaggatggacgaggaggtgtcggaccccacctctgcggctgctcagctgcggcagctccgggaccacttgcctccaccctcatctgccagcccctccagagcgttgccagagccacaggaggcccagaagctggcagcagagcgggcccgggcgcctgtggtgccctacggcgtggacctgcactactggggccaggagctccccacagccgggaagattgtcaagtctgactcccagcaccgcttctggaagcccagcgaggtggaggaggaagtggtcaatgccgacatctccgagatgctccggagccgccacatcacttttgccgggaagtttgagcctgtgcagcactggtgccgtgccccgaggccagacggccggctctgtgagcgccaagaccggctgaagtgccctttccatgggaagattgttccacgggacgacgaaggacggccgctcgacccggaagacagggctcgtgagcagcggcggcagctgcagaagcaggagcgcccggaatggcaggaccctgagttgatgagagacgtggaagcagccacagggcaggatctcggctcatccaggtacagcgggaaaggcagggggaagaagaggaggtaccccagcctcaccaacctgaaggctcaggctgataccgcccgcgctcgcattgggagaaaagtcttcgccaaggcagctgtgcggagggtagtggcagccatgaaccggatggaccagaagaagcacgagaagttttcaaaccagtttaactacgcactgaactagagagcggggcccagtgcactggccatcagcactttctccctctgccagtgtctcaggacagcagagtgggcgtgggtctgggcagtaaccatgctttgtctattactgtgtttgatgtaaagaaatggtgtgttgcaatgccctgaaggtacggccgctctgctgctacagggttcggcatcgtctggtgatgggtctggcctcgcagaagaggccctcgggcctggagatgtgaacacaggcagcgaccctgttccagagggcttctgcgagtcctcgtgagaccagtgcttgtcgtggtgtggggttcagcacggacggaatgtgtgtgcagctcagccttcagagcgtgcattccccagccaggaggcgaccactcagaggaactctgggaaacccacttttgtgcaaatgctgtttttaacacaaacacaaaggctagtgaaccgttca

SEQ ID NO: 48185 - DNA, 1431 bp, Homo Sapiens
atgtccaactcggattaccttcccgactacccactcaactcagatttagtgaagagattaaagtctgccctggatgccaaagatgaggagagagtgagggatttaatctgcactgaaatcacgcctgtggacgctgtgatagaactggccaatgacgactggatgaaagacccctcggctcagctgcccaccggcatgctgctaggggacctcgaccatctgaagcccctcatggaccagttcttccaggatgccaacgtggtgtttgagatcaataaggatgagatggaatggcaggtgaaatctccagccacgtttggactatcaggcctctggaccctggagtacaagcgtgagctcaccacgcccctgtgcatcgccgcggcccacggccacaccgcctgcgtgcgacacctgctcggccgcggcgcagacccagacgccagccccggcggccgcggcgccctgcacgaggcctgcctcgggggccacaccgcctgcgtccgcctgctgctgcagcaccgcgccgaccccgacctgctcagcgccgagggcctggcgcctctgcacctctgccgcacggccgcctcgctcgggagcaagcagagggcatgggggcatggcacggcagagtgtgctctcagcaccatacctggtcaggcagaattgaagcatggagaggcggcgcctcaggaggtgaacccgcacgcgcgcctgtacctgggccgcggggcgcacgtggacgcgaggaacggccgcggagagacggctctgagcgcggcctgcggtgcggcgcggaggcccgacgagcacgggcgctgcctgcgcctgtgcgcgctgctgctgcggcgcggggcggaggcggacgcgcgcgacgaggacgagcgcagcccgctgcacaaagcctgcggccacgcgagccacagcctggcgcgcctcctactgcggcacggcgccgacgcgggcgcgctcgactatggcggggcctcgccgctgggccgcgtgctccagaccgcatcctgcgctctccaggcctcaccgcagcgcacggtgcaggcgctgctcaaccacggctctcccaccgtgtggcccgacgccttccccaaggtgctgaagacctgtgcatctgtccccgcagtcatcgaggtgcttttcaactcctaccctcagctctgcttgtcagagtcctggaaggaagtgattcctgaggaagtattccaggcaagagggctgcctttctgcccatctttaatgcacaagccgttctaccagtccctctttgccttggccctcaccccacgctgcctgcagcatctttgccgctgtgctcttcgcagactgtttggcaaaaggtgctttgacctcatccccctgttacccttgccaaagcccctgcagaattacctacttttggagccacagggtgttttg

SEQ ID NO: 48186 - DNA, 1782 bp, Homo Sapiens
aaaaggaagaaggaaataaggatatttcaagggttaccaaagtcgaggaaaactattttaagaagaaatctgaattatttgtgcacataggttgtaataatagcatcttgcattaaatggtgttttctagcttacaaagtggattcatatacactattgtaactgactctctacaaacttgcaaggttagcaagacaaatggtattttaagataacaaactgagactcaaaaaaggcaagtaactcgttctacttcccaaagccagaaagtggcaaaatagaaaatggatcctgaatctccaacaccatgcaaactaagagagggaatcctctgtagagggaatggaagtaaaaaggcacaagtggtgatgtcaccttctgaacagagatggaacatttcttcctctgagaaaaaagagaaaagatagctttaagtggcaaaagaacatgaagcaatgtgaggtgaagaaacagaaaagactatggatggaattcctagatgtgagatacacaaagttccatttcaaagagaaatatctatagataggcataaagttacacacctgaactaccaactctgaaccagtaactcaagagatattttgtgtgtcccacaagccatatggctctggggacaaattatctgaaagtgcccaataagaaaaatatttgaggaaggggagttggtgagtgaatgaattaaaggacatcagaaagatacattgactgttctccttcccaggaaacaaagtggctaagtcaaaacaacgggcagctgtgggatagcaaagaaaaaaaacttccaggcccaggttctagtgaaagctactatggaagttagccactcaactttagaaccagaggcttcttttcctcctcccttcttatcttttctagtttatagcaaatttatattgagccacttattctttctgaatgctagttcccctttagcatttctttttcttcattccctttggactggcccaatgctttggccccttatcaaagcattttctaagaaacagtctgacagctctaatttgcatctggttatgcaagatgtggttaagaacatggactctggaggtaaatacaccttgattccaattcattctctcatttattcattcagcaaatatttagtgaacatctaacatgtgctaggcactgttctagttgctgaggatacagcttcaaacaaaataaggtctctgcaaggatgccttctcttaccactcctattcagcgtagtattggaagtcctggccagggcaatcaggcaagaaaaagaaatcaaggtcatccaaataggaagagaggaagtcaaactatccctgtttacagacaacatgatcctacatctagaaaaaaacccattgtcttagcccaaaagcttcttaggctgataaacaacttcagcaaagtcttaggatacaaaatccatgtgcaaaaaacactagcattcttatacaccaacaacagtcaagccgagatccaaatcaggaacaaactcctattcacaattgccacaaaaacaatagaacaggaaaacagctaactaggaaggtgaaagatctctacaaggagaactacaaaccactgctcacagaaatcagagatgacacatataaatggaaaaacattccatgatcatggataggaagaatgaatattactgaaatggctatactgtccaaagcaatttatagattcaatgctattcctagtaaactaccattgagattttttacagaactagaaaaaaaaaaactattttaa

SEQ ID NO: 48187 - DNA, 177 bp, Homo Sapiens
atgaaaacccaagacgatggagtattgcccccttatgatgtgaaccaactgcttggctgggacctgaatttgagtttattcctagggctctgtttgatgttacttctggctggctcatgtctgccctctcctgggatcacgggactatcccatggatccaacagagaagacaggtga

SEQ ID NO: 48188 - DNA, 1113 bp, Homo Sapiens
atgcaaggacagggcaggagaagaggaacctgcaaagacatattttgttccaaaatggcatcttacctttatggagtactctttgctgttggcctctgtgctccaatctactgtgtgtccccggccaatgcccccagtgcatacccccgcccttcctccacaaagagcacccctgcctcacaggtgtattccctcaacaccgactttgccttccgcctataccgcaggctggttttggagaccccgagtcagaacatcttcttctcccctgtgagtgtctccacttccctggccatgctctcccttggggcccactcagtcaccaagacccagattctccagggcctgggcttcaacctcacacacacaccagagtctgccatccaccagggcttccagcacctggttcactcactgactgttcccagcaaagacctgaccttgaagatgggaagtgccctcttcgtcaagaaggagctgcagctgcaggcaaatttcttgggcaatgtcaagaggctgtatgaagcagaagtcttttctacagatttctccaacccctccattgcccaggcgaggatcaacagccatgtgaaaaagaagacccaagggaaggttgtagacataatccaaggccttgaccttctgacggccatggttctggtgaaccacattttctttaaagccaagtgggagaagccctttcaccctgaatatacaagaaagaacttcccattcctggtgggcgagcaggtcactgtgcatgtccccatgatgcaccagaaagagcagttcgcttttggggtggatacagagctgaactgctttgtgctgcagatggattacaagggagatgccgtggccttctttgtcctccctagcaagggcaagatgaggcaactggaacaggccttgtcagccagaacactgagaaagtggagccactcactccagaaaaggtggatagaggtgttcatccccagattttccatttctgcctcctacaatctggaaaccatcctcccgaagatgggcatccaaaatgtctttgacaaaaatgctgatttttctggaattgcaaagagagactccctgcaggtttctaaagtgagttga

SEQ ID NO: 48189 - DNA, 558 bp, Homo Sapiens
atggggcaatgcttgaggtatcagatgcactgggaggacctggaagagtaccaggccctgaccttcctgaccagaaatgaaattctgtgcatccatgacaccttcctgaagctctgccctcctgggaagtactacaaggaggcaacgctcaccatggaccaggtcagctccctgccagctctgcgggtcaaccctttcagagaccgtatctgcagagtgttctcccacaaaggcatgttctcctttgaggatgtgctgggcatggcatctgtgttcagcgagcaggcctgcccaagcctgaagattgagtatgcctttcgcatctatgattttaatgagaatggcttcattgatgaggaggatctgcagaggatcatcctgcgactgctgaacagtgatgacatgtctgaggacctcctgatggacctcacgaaccacgtcctgagtgagtcggatctggacaatgacaacatgctgtccttctcagagtttgaacatgcaatggccaagtctccagatttcatgaactcctttcggattcacttctggggatgctga

SEQ ID NO: 48190 - DNA, 336 bp, Homo Sapiens
atggcctcaatctcccagcttgcctgcatctatttggtcttcattctgtatgaggatgaagtgactgtcagggaggataagatcaatgacctcattaaagcagctggtgtaaatgttaaatttttttggcctggcttgtttgcaaaggccctggtcaatgtctgcatcaggagcctcatctgcactgaaggggccagtggacctgctccagcagctggtgctgcaccagcaggaggtcctgccccctccaccaccactgcctcaacgaaggagaataaagcagaagcaaataaagaatctgaggagtatgttgaggacaagagctttggtctttta

SEQ ID NO: 48191 - DNA, 2459 bp, Homo Sapiens
cggacattcgtattcgggtggccatcccactggactacgagaccgtggaccgctacgactttgatctctttgccaatgagagtgtgcctgaccatgtgggctatgccaaggtgaagatcactctcatcaatgaaaatgacaaccggcccatcttcagccagccactgtacaacatcagcctgtacgagaacgtcaccgtggggacctctgtgctgacagtcctggcaactgacaatgatgcaggcacctttggggaagtcagctacttcttcagtgatgaccctgacaggttctcgctggacaaggacacgggactcatcatgctgattgccaggctggactatgagctcatccagcgcttcaccctgacgatcattgcccgggacgggggcggcgaggagaccacaggccgggtcaggatcaatgtgttggatgtcaacgacaacgtgcccaccttccagaaggatgcctacgtgggtgctctgcgggagaacgagccttctgtcacacagctggtgcggctccgggcaacagatgaagactcccctcccaacaaccagatcacctacagcattgtcagtgcatctgcctttggcagctacttcgacatcagcctgtacgagggctatggagtgatcagcgtcagtcgccccctggattatgaacagatatccaatgggctgatttatctgacggtcatggccatggatgctggcaacccccctctcaacagcaccgtccctgtcaccatcgaggtgtttgatgagaatgacaaccctcccaccttcagcaagcccgcctacttcgtctccgtggtggagaacatcatggcaggagccacggtgctgttcctgaatgccacagacctggaccgctcccgggagtacggccaggagtccatcatctactccttggaaggctccacccagtttcggatcaatgcccgctcaggggaaatcaccaccacgtctctgcttgaccgagagaccaagtctgaatacatcctcatcgttcgcgcagtggacgggggtgtgggccacaaccagaaaactggcatcgccaccgtaaacatcaccctcctggacatcaatgacaaccaccccacgtggaaggacgcaccctactacatcaacctggtggagatgacccctccagactctgatgtgaccacggtggtggctgttgacccagacctgggggagaatggcaccctggtgtacagcatccagccacccaacaagttctacagcctcaacagcaccacgggcaagatccgcaccacccacgccatgctggaccgggagaaccccgacccccatgaggccgagctgatgcgcaaaatcgtcgtctctgttactgactgtggcaggccccctctgaaagccaccagcagtgccacagtgtttgtgaacctcttggatctcaatgacaatgaccccacctttcagaacctgccttttgtggccgaggtgcttgaaggcatcccggcgggggtctccatctaccaagtggtggccatcgacctcgatgagggcctgaacggcctggtgtcctaccgcatgccggtgggcatgccccgcatggacttcctcatcaacagcagcagcggcgtggtggtcaccaccaccgagctggaccgcgagcgcatcgcggagtaccagctgcgggtggtggccagtgatgcaggcacgcccaccaagagctccaccagcacgctcaccatccatgtgctggatgtgaacgacgagacgcccaccttcttcccggccgtgtacaatgtgtctgtgtccgaggacgtgccacgcgagttccgggtggtctggctgaactgcacggacaacgacgtgggcctcaatgcagagctcagctacttcatcacaggtggcaacgtggatgggaagttcagcgtgggttaccgcgatgccgttgtgagaaccgtggtgggcctggaccgggagaccacagccgcctacatgctcatcctggaggccatcgacaacggccctgtagggaagcgacacacgggcacagccaccgtgttcgtcactgtcctggatgtgaatgacaaccggcccatctttctgcagagcagctatgaggccagcgtccctgaggacatccctgaaggccacagcatcttgcaggcaggttgcagagctgaggatagggctctggctccccacaaacaggaggaagacttggcctccccctgcatatctcccgccccacccagaagggcctttcagagtagcggggagaaagagacgtcacaatttcccggaaaggagttgagaagagagccagggcccagcaaggcccagaacagagctgctttcacagagcccttggccgaggctcccctcttgggaagtaaacaggcacaagaagaaagggctcctttgcccagggagcaggcgcaacagctccaaggctcagagggagagaagggaggaccctga

SEQ ID NO: 48192 - DNA, 831 bp, Homo Sapiens
gcgagcggcttccgccgggctgctccgcgggcgcgtcggccatgagcgagttgccgggcgacgtgcgggcgtttctgcgggagcacccgagcctgcggctccagacggacgcccgcaaggtgaggtgcatcctgacaggtcacgagctgccctgccgcctgccggagctccaggtctacacccgcggcaaaaagtaccagcggctggtccgcgcctccccggccttcgactatgcagagttcgagccgcacatcgtgcccagcaccaagaacccgcaccagttgttctgcaaactcaccctgcggcacatcaacaagtgcccagaacacgtgctgaggcacacccagggccggcggtaccagcgagctctgtgtaaatatgaagaatgtcagaagcaaggggtggagtacgtgcctgcctgcctggtgcaccggaggaggaggagggaggaccagatggacggtgacgggcctcgcccgcgggaagccttctgggagcccacatccagtgatgaggggggagctgcaagtgatgacagcatgacagacctgtacccacctgagctattcaccagaaaggaccttggaagcacggaggatggggatggcactgatgactttttgacagacaaagaggatgagaaggcaaagcccccaagagagaaggccactgatgagagcaggagagagacgaccgtgtaccgagggctggtccagaagcgcgggaagaagcagttgggctcgttgaaaaagaagttcaagagtcatcaccgcaaacccaagagcttcagctcctgtaaacagccaggttaataaaagcacatgccgtgaa

SEQ ID NO: 48193 - DNA, 816 bp, Homo Sapiens
gccaggatcatgtccaccaccacatgccaagtggtggcgttcctcctgtccatcctggggctggccggctgcatcgcggccaccgggatggacatgtggagcacccaggacctgtacgacaaccccgtcacctccgtgttccagtacgaagggctctggaggagctgcgtgaggcagagttcaggcttcaccgaatgcaggccctatttcaccatcctgggacttccagccatgctgcaggcagtgcgagccctgatgatcgtaggcatcgtcctgggtgccattggcctcctggtatccatctttgccctgaaatgcatccgcattggcagcatggaggactctgccaaagccaacatgacactgacctccgggatcatgttcattgtctcaggtctttgtgcaattgctggagtgtctgtgtttgccaacatgctggtgactaacttctggatgtccacagctaacatgtacaccggcatgggtgggatggtgcagactgttcagaccaggtacacatttggtgcggctctgttcgtgggctgggtcgctggaggcctcacactaattgggggtgtgatgatgtgcatcgcctgccggggcctggcaccagaagaaaccaactacaaagccgtttcttatcatgcctcaggccacagtgttgcctacaagcctggaggcttcaaggccagcactggctttgggtccaacaccaaaaacaagaagatatacgatggaggtgcccgcacagaggacgaggtacaatcttatccttccaagcacgactatgtgtaatgctctaagacctctcagcac

SEQ ID NO: 48194 - DNA, 1714 bp, Homo Sapiens
tgtctatagtaggtgcggagaagaaatgtttggcagatgaagaaaatgaggtgcagagaggatttaagagattctctcttactgcctgttcagggtcagtccagaattgagggtctccgggggagggcagaggctttgccctgcaggggatctgtgggagggggttaggagggagcagatgagcccaggatgaatggtcagagtcaggtgctgcccggcggaggtcacgagtccagggaggggatcaacatggccgctgcaccccggactgtgttgatctccggctgctcatcaggaattggtctggaacttgcagtgcaactggcccatgaccccaagaagcgctaccaggtcgtggccaccatgagggacctggggaagaaggagacactggaggcagctgctggggaggctctggggcagaccctcaccgtggcccagctggacgtgtgcagtgatgagtcggtggcccagtgtctcagctgtatccagggagaagtggacgtgctggtgaataatgctggaatgggcctggtggggcccctggaggggctcagccttgctgccatgcagaatgtctttgacaccaactttttcggagctgtccgtctcgtcaaagctgtgcttccaggcatgaagaggaggcggcagggccacatcgtggtgatcagcagtgtcatgggcctgcagggtgtcatcttcaacgatgtctatgcagcttccaagttcgccctggagggattcttcgaaagcctcgctatccagctgctgcagttcaacatcttcatctccctggtggagccaggccccgtggtcaccgagtttgaggggaagcttctggcgcaggtttctatggctgagttcccaggcactgaccctgagaccctgcactacttccgggacctctatctcccagcctccaggaagctgttttgctccgtgggacagaacccacaggacgtggttcaggccattgtcaacgtcatcagctcgactcgaccacccctgcgccgacagaccaacatccgctactcgccgctgaccacgctcaaaaccgtggattcctctggcagcctgtatgtgcgaacgacccaccgcctcctcttccgctgtccacgcctcctcaaccttggccttcaatgtctgtcctgcggctgcctcccaacgcgggtgcggccaagatgagcagaacagagcttcacgatccccatccctgaacaaccagacctcttcattccacatctaattcaaaggatgaacagactcttcatttattcattctgcaaactccccctcccctcctctgtgcctagacatggctagaatcccagaagggcctttattttcaggcatagactcctctgtggtcacagctggagcacagagagggaccctgggaacttggcctgggaagcccagagcaggaagccacagctgtctctgggaaagcaagggaggcttcctggaggaagcggcattgttatgagccttgaaggaagagacagactctgctacattcaacctcgtgacttcatgatcctgggcctgagaacacaggaatgattcatagcccaccccccacctccatgcatacaccagagctctgtggaccaaggggtcattcctggtcacacactccatcagcaaaatgtatttgagcacacaccagcaatgtatgtatattttttccattaaatatatatttataaccaca

SEQ ID NO: 48195 - DNA, 810 bp, Homo Sapiens
atgattgtcctcatccgaattgattcccgccttcacacacccatgtactttttcctcagccacctgtcctttgtggacacctgcttctcctcagttgtgagccccaagatgctcactgacttctttgtgaagaggaaagccatttctttccttggctgtgctttgcagcagtggttctttgggttctttgtggcagcagactgtttcctcttggagtccatggcctatgactgctatgtggccatctgtaacccattgttatactcagttgctatgtcccagaggctctgcatccagctagtggtgggtccctatgtcattggactcatgaataccatgactcacacaacaaatgcattttgtctccctttttgtggccctaatgtcatcaatcctttcttctgtgatatgtcccccttactttcccttgtatgtgctgataccaggctcaataagttggcagttttcatcgtggctggagctgtgggagtcttcagtggtctgactatcctgatttcctacatttacatcctcatggccatcctgaggatccgctctgctgatgggaggtgcaaaaccttttctacttgctcttctcacctgacagctgttttcatctcgtatggtacccttttctttatttatgtacatcccagtgcaaccttctccctggatctcaataaagtagtgtctgtgttttacacagcagtgattcctatgttgaacccacttatctacagcttgagaaacaaggaagtcaaagatgccatccacaggactgtcactcagaggaagttttgcaaggcctaa

SEQ ID NO: 48196 - DNA, 402 bp, Homo Sapiens
tacagctggggctgcggtcagcgcttcgatcatgagaccaattccgatgatgcctgtacataccacccaggtgttccagtctttcacgatgctttaaagggttggtcttgctataagagaagaacaactgatttttctgatttcttaagcattgtacactgcacaaaaggtagacataatagtgagaagccacctgaaccagtcaaacctgaagtcaagactactgagaagaaggaaatatctgaattgaaacccaaatttcaggaacacatcattcaagcccctaagccagtagaagcaataaaacggccaagcccagatgaaccaatgacaaatttggaattaaaaatatctgcctccccaaaacaagcacttgataaactgtcgtcagggaatgaagaa

SEQ ID NO: 48197 - DNA, 1383 bp, Homo Sapiens
atgaaggcagcgcgccctcccatgactgcagggaagttcatggtggtcggcggcggcatcgcgggcgtcacttgtgcggagcagttggctactcactttccatcagaagatattctcttggtaacagcttctcctgttatgaaagcagttacaaatttcaagcagatttctaaaatattggaagaatttgatgttgaagaacaatcaagtaccatgttagaaaaacgctttcccaacatcaaggttatagaatctggcgtaaagcaactgaagagtgaagaacactgcattgtaacagaagatggcaatcagcatgtatataagaaactctgtgctggagctaaaccaaagttgatatgtgaaggaaatccttatgtattaggaatccgtgatacagacagtgctcaggaatttcagaaacagcttactaaagctaaaagaataatgatcttagggaacggtggtatcgcacttgagttagtgtatgaaattgaaggctgtgaagtgatttgggccattaaagataaagctatagggaatactttcttcgatgcaggagcagctgaattcttgacttcaaagctcattgctgaaaaatcagaggctaaaattgcatataaaagaaccagatatacaactgaaggaaggaaaaaggaagctagaagcaaatctaaatcagataatgtaggcagtgcgttgggaccagattggcatgaaggcttgaatcttaaaggaacaaaagagttttctcataagattcaccttgaagctatgtgtgaagtaaagaaaatctaccttcaggatgagtttagaattttgaagaaaaagtccttcacttttccaagagaccatacgtcagttacaactaatacagagatgtggcctgtctatgtggaattgaccaatgaaaagatatatggctgcgatttcattgtcagtgctacaggagttacaccgaatatagaaccttttctccatggtaacagttttgatctaggagaagatggtggcctgaaagtggatgatcatatgcacacatcccttcctgatatctatgctgccggtgacatctgtactacatcctggcagctgagcccagtctggcagcagatgaggctgtggacccaggctagacagatgggatggtatgcagcaaagtgcatggctgcagcgagttcaggagactctattgacatggatttcagctttgaactgtttgctcatgtgacaaaattttttaactataaggttgtactgctgggaaaatacaatgcacagggcttaggttcagatcatgaattaatgctgagatgtaccaaaggacaaatacatcaaagtcgtcatgcaaaatggacgaatgatgggagctttcttaattggtga

SEQ ID NO: 48198 - DNA, 879 bp, Homo Sapiens
atgccgcgctccttcctggtgaaaacgcactccagccacagggtccccaactaccggcggctggagacgcagagagaaatcaatggtgcctgctctgcctgtggggggctggtggtgcccctcctcccccgagacaaggaggccccttctgtgcccggtgaccttccccagccctgggaccgctcctcggccgtcgcctgcatctccctgcccctcctgccacggatcgaggaagctctgggggcctctgggctggacgccttggaagtcagcgaggtcgaccctcgggccagccgggccgccattgtacccctcaaagacagcctgaaccacctcaacctgcccccactgctggtgctgcccacacggtggtccccgaccttgggcccagaccggcacggggctccggaaaaactgcttggggctgagcggatgccccgagccccgggcggctttgagtgcttccactgccacaaaccctaccacacgctggccgggctggccaggcaccggcagctgcactgccacctgcaggtggggcgtgtcttcacctgcaagtactgcgacaaggagtacaccagcctgggtgccctcaagatgcacatccgcactcacacgctgccctgcacctgcaagatctgtggcaaggccttctccaggccctggttactgcagggccatgtccgcacccacacaggggagaagccctatgcctgctcgcactgcagcagggcctttgccgaccgctccaaccttcgggcccatctgcaaacgcactcagacgccaagaagtaccggtgccggcgctgcaccaagaccttctcccgcatgtccctcctggcgcggcatgaggagtctggctgctgcccgggcccctga

SEQ ID NO: 48199 - DNA, 348 bp, Homo Sapiens
gtcacccaggctggagtgcagtggcaccatcttggctcactgcaacctccgccccccagcctgggcgacagagcaagactctctctctcaaaacaaaaaacaaacaacaacaacaacaacaacaaaacacagagaatgtactctaagaccatagaaaaaataataaagataaaagcaaaagcagaatttaatgaactagaaaagagacacagagtaatacagggcaataatgcctacatgtctgcttcttgtaagaccaatgaacctaatgagcttttaccaagacaaggaaaaacgggagaaggtacaagtaaacaacaaacactaggaatgaaaaagcagacataa

SEQ ID NO: 48200 - DNA, 925 bp, Homo Sapiens
gcggccgctgcatggcgctgagatggcgggggcgccgcgcggcggaggcggcggcggaggcggcgcgggcgagcccgggggcgccgagcgggcggccgggacaagccgccggcgcgggctccgggcgtgcgacgaggagttcgcttgcccagagctggaggcgctgttccgcggctacacgctgcggctggagcaggcggccacgctgaaggcgctggccgttctcagcctgctggcgggcgcgctggcgctggccgagctgctgggcgcgccggggcccgcgcccggcctggccaagggctcacacccggtgcactgcgtcctcttcctggcgctgctcgtggtaaccaacgtccggtccctgcaggtgccccagctgcagcaggtcggccagctggcgctgctcttcagcctcaccttcgcgctgctctgctgtcctttcgcgctgggcggccccgcccggggttccgccggggccgctggggggccagcgaccgccgaacaaggggtttggcagctccttttggtcaccttcgtgtcctatgccttgctgcccgtgcgcagcctgctggccataggctttgggctcgtggtggctgcgtcgcacttgctggtcacagccaccttggtccccgccaagcgcccacgtctctggaggacgctcggtgccaatgccttgctcttcgtcggtgtgaacatgtatggggtctttgtgcggattctgactgagcgttcacagaggaaggcgttcctgcaggcccggagctgcattgaggaccgactgaggctggaggatgagaacgagaagcaggagcggctcctcatgagcctcctgccccggaacgttgccatggagatgaaggaggacttcctgaagccccctgagaggattttccacaagatttacatccagaggcacgacaat

SEQ ID NO: 48201 - DNA, 636 bp, Homo Sapiens
atgatttccagaatggagaagatgacgatgatgatgaagatattgattatgtttgctcttggaatgaactactggtcttgctcaggtttcccagtgtacgactacgatccatcctccttaagggatgccctcagtgcctctgtggtaaaagtgaattcccagtcactgagtccgtatctgtttcgggcattcagaagctcattaaaaagagttgaggtcctagatgagaacaacttggtcatgaatttagagttcagcatccgggagactacatgcaggaaggattctggagaagatcccgctacatgtgccttccagagggactactatgtgtccacagctgtttgcagaagcaccgtgaaggtatctgcccagcaggtgcagggcgtgcatgctcgctgcagctggtcctcctccacgtctgagtcttacagcagcgaagagatgatttttggggacatgttgggatctcataaatggagaaacaattatctatttggtctcatttcagacgagtccataagtgaacaattttatgatcggtcacttgggatcatgagaagggtattgcctcctggaaacagaaggtacccaaaccaccggcacagagcaagaataaatactgactttgagtaa

SEQ ID NO: 48202 - DNA, 321 bp, Homo Sapiens
atggttaacgtccctaaaacccaccagactttctgtaagaagtgtggcaagcaccaaccccacaaagtgacacagtacaagaagggcaaggattctctgtatgcccagggaaagtggcgttataacaggaagcagagtggctatggtgggcagactaagccgattttccagaaaaaggctaaaactacaaagaatactgtgctaaggcttgagtgcgttgagcccaactgcagatccaagagaatgctggctattaaaagatgcaagcattttgaactgggaggagataagaagagaaagggccaagtgatcccgttctaa

SEQ ID NO: 48203 - DNA, 755 bp, Homo Sapiens
gtgggatagtagcgtgtccacattgtcctttgagaatgagaagtcatcctggagcacagctcttcccacgctccgggcccacacacccagcctcactccatcaaaggagccccgctgcctgcccacccaccctgggtgctttctggcttgcagtgctcttggcagacatgaggcaacgattgctcccgtccgtcaccagccttctccttgtggccctgctgtttccaggatcgtctcaagccagacatgtgaaccactcagccactgaggctctcggagaactcagggaaagagcccctgggcaaggcacaaacgggtttcagctgctacgccacgcagtgaaacgggacctcttaccaccgcgcaccccaccttaccaaggggatgttccaccgggaattagaaataccatctgccatatgcagcaagggatctgcagactttttttctgccattctgggacaggccagcagcacagacaacgctgtggataaggagagtagagacttcctcttcctgcctcctgtcttctggagttgtgacctcagggtggcccaggtggatcggcttcagaggccaggaggcagctctctgcagccgaagagcaggagcctcacccagggtctgtggctctgactaagcctggactgcctctcggctgtgctccatggactggctccccagggatccatgtgagagaccggagtatgatcctcagtgcgaggacaaataaaagtagtgattatgtccacccc

SEQ ID NO: 48204 - DNA, 4241 bp, Homo Sapiens
cagctcggtcgcccccaccggccccatggcagcccccggcgccccagctgagtacggctacatccggaccgtcctgggccagcagatcctgggacaactggacagctccagcctggcgctgccctccgaggccaagctgaagctggcggggagcagcggccgcggcggccagacagtcaagagcctgcggatccaggagcaggtgcagcagaccctcgcccggaagggccgcagctccgtgggcaacggaaatcttcaccgaaccagcagtgttcctgagtatgtctacaacctacacttggttgaaaatgattttgttggaggccgttcccctgttcctaaaacctatgacatgctaaaggctggcacaactgccacttatgaaggtcgctggggaagaggaacagcacagtacagctcccagaagtccgtggaagaaaggtccttgaggcatcctctgaggagactggagatttctcctgacagcagcccggagagggctcactacacgcacagcgattaccagtacagccagagaagccaggctgggcacaccctgcaccaccaagaaagcaggcgggccgccctcctagtgccaccgagatatgctcgttccgagatcgtgggggtcagccgtgctggcaccacaagcaggcagcgccactttgacacataccacagacagtaccagcatggctctgttagcgacaccgtttttgacagcatccctgccaacccggccctgctcacgtaccccaggccagggaccagccgcagcatgggcaacctcttggagaaggagaactacctgacggcagggctcactgtcgggcaggtcaggccgctggtgcccctgcagcccgtcactcagaacagggcttccaggtcctcctggcatcagagctccttccacagcacccgcacgctgagggaagctgggcccagtgtcgccgtggattccagcgggaggagagcgcacttgactgtcggccaggcggccgcagggggaagtgggaatctgctcactgagagaagcactttcactgactcccagctggggaatgcagacatggagatgactctggagcgagcagtgagtatgctcgaggcagaccacatgctgccatccaggatttctgctgcagctactttcatacagcacgagtgcttccagaaatctgaagctcggaagagggttaaccagcttcgtggcatcctcaagcttctgcagctcctaaaagttcagaatgaagacgttcagcgagctgtgtgtggggccttgagaaacttagtatttgaagacaatgacaacaaattggaggtggctgaactaaatggggtacctcggctgctccaggtgctgaagcaaaccagagacttggagactaaaaaacaaataacagaccatacagtcaatttaagaagtaggaatggctggccgggcgcggtggctcacgcctgtaatcccagcactttgggaggccaaggcgggcggatcacgaggtcaggagttcgagaccagcctgaccaacatggtttgctgtggaatttgtcatctaatgacaaactcaagaatctcatgataacagaagcattgcttacgctgacggagaatatcatcatccccttttctgggtggcctgaaggagactacccaaaagcaaatggtttgctcgattttgacatattctacaacgtcactggatgcctaagaaacatgagttctgctggcgctgatgggagaaaagcgatgagaagatgtgacggactcattgactcactggtccattatgtcagaggaaccattgcagattaccagccagatgacaaggccacggagaattgtgtgtgcattcttcataacctctcctaccagctggaggcagagctcccagagaaatattcccagaatatctatattcaaaaccggaatatccagactgacaacaacaaaagtattggatgttttggcagtcgaagcaggaaagtaaaagagcaataccaggacgtgccgatgccggaggaaaagagcaaccccaagggcgtggagtggctgtggcattccattgttataaggatgtatctgtccttgatcgccaaaagtgtccgcaactacacacaagaagcatccttaggagctctgcagaacctcacggccggaagtggaccaatgccgacatcagtggctcagacagttgtccagaaggaaagtggcctgcagcacacccgaaagatgctgcatgttggtgacccaagtgtgaaaaagacagccatctcgctgctgaggaatctgtcccggaatctttctctgcagaatgaaattgccaaagaaactctccctgatttggtttccatcattcctgacacagtcccgagtactgaccttctcattgaaactacagcctctgcctgttacacattgaacaacataatccaaaacagttaccagaatgcacgcgaccttctaaacaccgggggcatccagaaaattatggccattagtgcaggcgatgcctatgcctccaacaaagcaagtaaagctgcttccgtccttctgtattctctgtgggcacacacggaactgcatcatgcctacaagaaggctcagtttaagaagacagattttgtcaacagccggactgccaaagcctaccactcccttaaagactgaggaaaatgacaaagtattctcggctgcaaaaatccccaaaggaaaacacctatttttctactacccagcccaagaaacctcaaaagcatgccttgtttctatccttctctatttccgtggtcccctgaatccagaaaacaaatagaacataattttatgagtcttccagaagacctttgcaagtttgccaccagtagataccggccacaggctcgacaaatagtggtctttgttattagggcttatggtacatggcttcctggaatcaaaatgtgaattcatgtggaagggacattaatccaataaataaggaaagaagctgttgcattactgggattttaaaagtttgatttacatttatattccttttctggttcccatgttttgtcactcatgtgcacattgcttcgccattgggcctccagtgtattgttctgcagtgttgaaacagaatggaaatgacaagaaatatctgcagttatccaggagaaagtataatggcaaaattattggtttctttctttactttgtgcttgtttttatccccttgggttgtttttctctgatttttaaataaacttaagaaatttagattacagagtatgcatgactgtaagaaaaagaaattgagaggaagtgatcatagcaaattaaagaagtcttttcctcccagaacttaaagtaaaataaaaaataaataaataaataaaatcttttccacagagaaaggcaactgtgatgataaaatttaacgttcccccaaacactgagtcaatgagatttttctcaggagatactttacctataacaacgccgttaaatccaaatctcttctaaacgatggcattctatgtaatgcctttcctggacttttttggccactgccctggactagtgaaagaatggactctatctttatctgcaagaggaactaaggccttctctcagactgcctggccagcctggggcactgaaaatacggctcatgttaatgagttacattatcagccagcccagccttgcccaccatttaagaaatatcacagagccactagatctcatatgatcttcttcaagccattattttaactcaagaaaactctagagaagaaaagtgaagaagtcatgttgaagaagatgtaagaatgtgtcaagaccatccagaaatgatatgagaaatactgatattttaaatggttgacatcatccagcgaaatgaatctacattaaatgttgttttaactgcgctatgattaaaaccattcatatagagttagtctttacaactactattctgttatttttttttttaatctgacaacatttgtcctaagtaagataagcaaaaaaattcttcaactccttttggcaagaaaactgtaacagaaaataaattttgaatgtgtacttaagtctttattatatttgaagcaattttttttcaattttaaaagctgaatgaagacaacttaggttgctaacctagttcaaaatgaaattatttagataccaatttttaaaatactggagagaatttatatgtctttttccagagttctgatgataagca

SEQ ID NO: 48205 - DNA, 84 bp, Homo Sapiens
accgactcattggtcactcatctgctgaatgtatcctctcaggcaatactgcccattggagcacgaagccgccaatttgtcaac

SEQ ID NO: 48206 - DNA, 207 bp, Homo Sapiens
atggtcaatggatgtaactgggagaatttcacagaggctctgggacacctaaaaaacactcttttataccaaaagccattgaattgtgtaaacttgaaatggataagttgtacgctttgtaaattatatctcaataaagctcttgtaaaaaccttgcttttgactcctttgtgtacatcttttactacattgtgcttcctggaataa

SEQ ID NO: 48207 - DNA, 330 bp, Homo Sapiens
gatctcagccatattggagatgctgttgtaatttccggtgtaaaagatggaattatattttctgcaagtggagaccttggaaatagaaaaaaattgtcacagacaagtactgtcgataaagaggaggaagctgttaccatggagatgaatgaaccagttcaactaacttttgcactgaggtacctgaacttccttacaaaagccactccactctcttcaatggtgacactcaatatgtctgcagacatacaccttgttgtagactataaaattgctgatgtgggacacttaaagtactacttggctcccaagatggaggatgaagaagga

SEQ ID NO: 48208 - DNA, 787 bp, Homo Sapiens
atggatgaagatgggcttgaattacaacaagagccaaactcattttttgatgcaacaggagctgatggtacacacatggatggtgatcaaattgttgtggaagtacaagaaactgtttttgtttcagatgttgtggattcagacataactgtgcataactttgttcctgatgacccagattcagttgtaatccaagatgttattgaggacgttgttatagaagatgttcagtgcccagatatcatggaagaagcagatgtgtctgaaacggtcatcattcctgagcaagtgctggactcagatgtaactgaagaagtttctttagcacattgcacagtcccagatgatgttttagcttctgacattacttcagcctcaatgtctatgccagaacacgtcttgacgggtgattctatacatgtgtctgacgttggacatgttggacatgttggacatgttgaacatgtggttcatgatagtgtagtggaagcagaaattgtcactgatcctctgactaccgacgtagtttcagaagaagtattggtagcagactgtgcctctgaagcagtcatagatgccaatgggatccctgtggaccagcaggatgatgacaaaggcaactgtgaggactaccttatgatttcctgtaataattctgatggaattgaaaaccggaatggcactgcaagtgccctcttgcacatagatgagtctgctggcctcggcagactggctaaacaaaaaccaaagaaaaggagaagacctgattccaggcagtaccaaacag

SEQ ID NO: 48209 - DNA, 681 bp, Homo Sapiens
ggaagaggccgcgtggggcgaaggcggcgcttggctggtggggcccgcggcgggattttcccgggcggcgagagcggatctatcttgggatcccatggctttctttactgggctctggggccccttcacctgtgtaagcagagtgctgagccatcactgtttcagcaccactgggagtctgagtgcgattcagaagatgacgcgggtacgagtggtggacaacagtgccctggggaacagcccataccatcgggctcctcgctgcatccatgtctataagaagaatggagtgggcaaggtgggcgaccagatactactggccatcaagggacagaagaaaaaggcgctcattgtggggcactgcatgcctggcccccgaatgacccccagattcgactccaacaacgtggtcctcattgaggacaacgggaaccctgtggggacacgaattaagacacccatccccaccagcctgcgcaagcgggaaggcgagtattccaaggtgctggccattgctcagaactttgtgtgagttgagcccaggcctctggttgcaggactcgtgaatggagcagttctgagaaccacccttttgctaagggagcttgggagccacatggctgctcccttcacactgggtaacagtgtagtatcctgtgagagaataaatgtattcattta

SEQ ID NO: 48210 - DNA, 1086 bp, Homo Sapiens
atgacggggaaagcaggggaagcgctgagcaagcccaaatccgagacagtggccaagagtacctcggggggcgccccggccaggtgcactgggttcggcatccaggagatcctgggcttgaacaaggagcccccgagctcccacccgcgggcagcgctcgacggcctggcccccgggcacttgctggcggcgcgctcagtgctcagccccgcgggggtgggcggcatggggcttctggggcccggggggctccctggcttctacacgcagcccaccttcctggaagtgctgtccgacccgcagagcgtccacttgcagccattgggcagagcatcggggccgctggacaccagccagacggccagctcggattctgaagatgtttcctccagcgatcgaaaaatgtccaaatctgctttaaaccagaccaagaaacggaagaagcggcgacacaggacaatctttacctcctaccagctagaggagctggagaaggcattcaacgaagcccactacccagacgtctatgcccgggagatgctggccatgaaaacggagctgccggaagacaggatacaggtctggttccagaaccgtcgagccaagtggaggaagcgggagaagtgctggggccggagcagtgtcatggcggagtatgggctctacggggccatggtgcggcactccatccccctgcccgagtccatcctcaagtcagccaaggatggcatcatggactcctgtgccccgtggctactggggatgcacaaaaagtcgctggaggcagcagccgagtcggggaggaagcccgagggggaacgccaggccctgcccaagctcgacaagatggagcaggacgagcggggccccgacgctcaggcggccatctcccaggaggaactgagggagaacagcattgcggtgctccgggccaaagctcaggagcacagcaccaaagtgctggggactgtgtctgggccggacagcctggcccggagtaccgagaagccagaggaggaggaggccatggatgaagacaggccggcggagaggctcagtccaccgcagctggaggacatggcttag

SEQ ID NO: 48211 - DNA, 267 bp, Homo Sapiens
atggagtcagttgtaccagtgaaggacaagaaacttctggaggtcaaactaggggagctgccaagctggatcttgatgtgggacttcagccctagtggccttgatggagcgtttcaaagaggttactactggtactacaacaagtacatcaacgtgaagaaggggagcatctcggggtttaccatggtgctggcagggtacatgctcttcatctactgcctttcctacaaggagctcaagcacgagcggctatgcaagtaccactga

SEQ ID NO: 48212 - DNA, 448 bp, Homo Sapiens
tctcagaccccggagttcatcatctcggagccgctggccaatatgtactcatgtgggaaccagaacacactgatggaggagttggcagagcaggcacagcagcacgacgagatgctgcacatgcaccacgcgctgaaggaggcgctcagcatcatcggtgacatcaacaggaccactgttaccatgcccccgcccgtggacgacacctggttgcaggtgcagagcatccctgacgcacacaggtaccagagactgccccccacggccccaaaatcccccacccgggatgcccagaggactcctgggcggcaggacccagctcctgggcttcctcctgctgggtccgcccttggggaagtgtgccccataccctccaggccagaggcttcccctgatccctttgggccctacccccctggtgctcttgtgccccagccggggtccccag

SEQ ID NO: 48213 - DNA, 993 bp, Homo Sapiens
ggcgacatcgctaaccaggtactacggtccttggtagaagcatctagctcaggtgtgttggtactgagcctgtgtgagaaagatgatgccatgattatggaagaaatagggaaaatcttcaagaaaaaaatagaaatgagaaaaggtattgcttttcccaccagcatttcagtaaataactgtatatgtcacttctcccctttgaagagcaaccaggattatattctcaaggaaggtgacttggtaaaaattgaccttggggtccatgtggatggcttcatcgctaatgtagctcatacttttgtggttgatgtagctcaggggacccaagtaacagggaggaaagcagatgtcattaaggcaattcacctttgtgatgaagctgtcctacgcctggtcaaacctggaaaccagaacacacaagtgacagaagccctgaacaaagctgcccactcacttaactgcacgccaatagaaggtatgctgtcacatcagttgaagcagcatgtcatcgatggagaaaaaaccattatccagaatctcacagaccagaagaagaaggaccatgaaaaagcggaattggcggtacatgaagtatatgctgtggatgttctcgtcagctcaggagagggcaagagcaaggatgcaggacagagaaccactatttacaaaacccctcagcacggactgaagatgaaaacttcacatgccttcttcagtgaggtggaaaagtgttttgatgccatgccgtttactttaagagcatttgaagatgagaagaaggctcagattggtgtggtgaagtgcaccaaacatgaactggtgcaatttaatgttctctatgagaaggaaggtgaatttgttgcccagtttaaatgtatagttctgctgatgctcgatggccttatgcagataaccagtggtcccttcgagcctgacctctacaagtctgagatggaagtccaggatgcagagctaaaggctctcctctag

SEQ ID NO: 48214 - DNA, 3127 bp, Homo Sapiens
accaattatgttattcccttctccccaagaagtgggcagaaaagctttgttaacctccttttacagatgaggaaaaacaagatcagaggtgctaagtgctgtagcctagtgccaggtcttctggccccaattctgggttctccccaagcccatgtttcttcccctttctcacaatctttacttcttcctctgaccctcaccaccacccaaagtacttttaattccagaaaagaaacccagctgcacactggcacacctgaccttcatgcagtcagaagctttggatgattccccatccaaaatattagagatgaaatgaaagcaaagtaggcatctgacaaaagttgctttttcccttctgcattttaggacctcaagtaatgtttatccagaaactgctatcataccagggattcattgtgtatttaacaacataggcatacaatctggcaaatttgaaaaactcttaacatacaccccaaatccctgcccaaatttaagaactagggtggacacagtgcgtttttccatgtcgcatcttctgtgatggggctacgatacgtgggagcagagaatggggagggtggagcgcatgccagatgaggatctatcagcaatgggacggggcctccactttagcatctccaccctgctcctctcagaggaccgcctttcattgcattcagctgtgatggtagcacgaacacaggtgcaccgaggacgaggagagcaggagccttgtgctctctctgcatctgaggcaggacagcacagggtacggagcagtctgcagagaggccagctcatcagggaagcacttgtcttccaccttgggctttgactgagcactgggcaattggcctctggggatcaacgaaataatcctaaacagagttactctatgtcacactatggaatgttccaagtaggtggccgtgttttcaaaagatgtattttctccttttgttgttgccatttcataggtttaggattgggtgtgtgtttctcctctctgaatggcactcgaatgtttgctgactcctactctgtgtgactggggtgtacagctatggactgatgcatcccatcccatcatctttcatgatcaaagcagtctcttcttttttgacagctgaagaagcatcggtagggaatccagaaggagcgttcatgaaggtgttacaagcccggaagaactacacaagcactgagctgattgttgagccagaggagccctcagacagcagtggcatcaacttgtcaggctttgggagtgagcagctagacaccaatgacgagagtgattttatcagtacactaagttacatcttgccttatttctcagcggtaaacctagatgtgaaatcactgttactaccgttcattaaactgccaaccacaggaaacagcctggcaaagattcaaactgtaggccaaaaccggcagagagtgaagagagtcctcatgggcccaaggagcatccagaaaaggcacttcaaagaggtaggaaggcagagcatcaggagggaacagggtgcccaggcatctgtggagaacgctgccgaagaaaaaaggctcgggagtccagccccaagggaggtggaacagccccacacacagcaggggcctgagaagttagcgggaaacgccgtctacaccaagccttccttcacccaagagcataaggcagcagtctctgtgctgaaacccttctccaagggcgcgccttctacctccagccctgcaaaagccctaccacaggtgagagacagatggaaagacttaacccacgctatttccattttagaaagtgcaaaggctagagttacaaatacgaagacgtctaaaccaatcgtacatgccagaaaaaaataccgctttcacaaaactcgctcccacgtgacccacagaacacccaaagtcaaaaagagtccaaaggtcagaaagaaaagttatctgagtagactgatgctcgcaaacaggcttccattctctgcagcgaagagcctcataaattccccttcacaaggggctttttcatccttaggagacctgagtcctcaagaaaacccttttctggaagtatctgctccttcagaacattttatagaaaacaataatacaaaacacacaactgcaagaaatgcctttgaagaaaatgattttatggaaaacactaacatgccagaaggaaccatctctgaaaacacaaactacaatcatcctcatgaggcagattccgctgggactgcattcaacttagggccaactgttaaacaaactgagacaaaatgggaatacaacaacgtgggcactgacctgtcccccgagcccaaaagcttcaattacccattgctctcgtccccaggtgatcagtttgaaattcagctaacccagcagctacagtcccttatccccaacaacaatgtgagaaggctcattgctcatgttatccggaccttgaagatggactgctctggggcccatgtgcaagtgacctgtgccaagctcatctccaggacaggccacctgatgaagcttctcagtgggcagcaggaagtaaaggcatccaagatagaatgggatacggaccaatggaagattgagaactacattaatgagagcacagaagcccagagtgaacagaaagagaagtcgcttgagctcaaaaaagaagttccaggatatggctatactgacaaactcatcttggcattaattgttactggaatactaacgattttgattatacttttctgcctcattgtgatatgttgtcaccgaaggtcattacaagaagatgaagaaggattctcaaggggcattttcagatttctgccatggaggggatgctcttcgcgaagggagagtcaggatggactttcctcatttggacagccgctctggtttaaagatatgtacaaacctctcagtgccacaagaataaataatcatgcatggaagctgcacaagaagtcatctaatgaggacaagatcctcaacagggaccctggggacagcgaagccccaacggaggaggaggagagtgaagccctgccataggaggagaacacagcccacctcaggcctcctgcaaaaatacatagaataaacaacaacagttact

SEQ ID NO: 48215 - DNA, 2056 bp, Homo Sapiens
ggcccgcgggctagaggcactttaccgcccggcgggagcgcctctcctccgcgtccctcgccccagccccctgcccgccccactttgggaccctccagccgctttccccacaaatgagatctttgcaatgagcaaacgaaagtggcgcggatttcggggcgcccagcaggagcgagcgcagccgccagccgcaagtccgcagccgtgtcccgcgccccacgccggcctccccggcggcagccggagacgagcgccagcaccggcgggacagcagcagatgcgggccgagagccggtcaggggcgcagaggcggaggggatcggcgcggcggggagctcaccgcgaagctggaggctgcgtccgcgggcgcaccaggagctcaggcagcgagcgatcgaacgctctgtggcaggcggtggacgctgctgaagctctggctctgagctcaccgctccgccgtccgtgggaccaagcccagcattttacaaacccagctcctttctccaagggtcctcagagcgcccctccgtcaccccctgcagggcgccgcagacgaggcgctgaccttgcgctcactcccctcgctggggaaggacacactcgctggcgtcggccggcctgggaagtaggactaaggacccgaactgcaaccctccacaccagacagcacagaccaccccaaggctgctcaatctgcccaaagccaaaagagctcccctgccaggacctcggtgccgtggagactgcggggaacctgctctgcccacacctgctctggcccctagacggaagcacctggagccaaccacggaactccagatcccagctgtgtgactgaatccacgccagcctctctgagccaaagctgcttgcagaagggggagatcccagttcgaagactcccgcgcagagcctgtggccctctctgccaggcctcagggtgcctgagacactcacctctctgcctcgcagttggggctgaggctggggctggctgccagcctcagttctgggagcgctggggtcgcctgggccacaggccacagcagctcacctcaggactgggctctctggcctgctggggctcaggctgtggggcaggctgggcagggggctgagctggcagcgattcagagccctggggctgggggctggaatccacctcctcccacacaagctcggtggtgactcttcggcccctggggaaaaacaaaaagatattgctgagatgacctcttttaaaagcaaagcccccctccccatacaccccaagcctgagccctgtcccatccccctccccgggttccttcaggtcaccttgtcaggatctgggcagcggcttccccctctagcccctcccctgcctagagctccctctttcaaagtataagggagggaagaagtggtgagaagtttgcctagaaagggcttcccggtgctgatggagaggccgagacccttctgttggacaggctgccctgttcctgggtgaggatgggcttctgcctggcactgggggtggagggtgcacacgaatggcccgccttgaggggtcatggcacggaatatgaaagcctcctccacctccaaacacccccaccttggaaggagataaggagggggccccagcaaaagccactggacacacagctctgcttgacgaggccagtgagggacggcgtggctgtgcttcctggggaaatgaaccccctccccacagacaccaccctgggtggatcgaggagtctgggtccagggtgcaacagagaaaaacttcatgcatgaatgagcattcccagggaaactgccttggccccagggcgcctctctgtgccagggaggctgggagagcagcaagggggaccaggtgcgccatcaggaggagagaagctaaacctaggggggacatggagggcggttgttgcctctcccggcatttctcctcagtctcctgtccaatttcttgctggtggtcaggaggcatagggaggcaggagggaaggaagctttacctgtaaaatggtgtatatatgtataaataaaatctctgcgccag

SEQ ID NO: 48216 - DNA, 791 bp, Homo Sapiens
accactgcaagggcagacccagactgtgcaacccccaaagcaggtctcctcactcaccgggatagatagaactatcggccccaattcctcagccctacctgcaaccaccgcttgccatggtttccttgtgggtggagggtactttcccgccccctggtttcgggcttgcccacgtggcttgctctggccatggaatgaagcagaaacgaaagcctgccagttctgagcctacgccggaagacgccttgggcggttccgcggtccctgtgcgcttccaccttcacccagaaggacttctctggtgcagccgctgcttcttcagccacggcccaaaaggatcggagccccctggccgatccgcaggtctgcagggagccacagagcgcagcggccggcccagcgttcaagcccaagcacaggcctgcgagaaccttgttccagccaccgtttgggatggttgattaggacttgttgctgtggcggtagctcaccaatccaatgcgtgcacccgctcctttattaggctatagggccagtggctgcgacagggacctgatacaacagtgcgttaaataaggagcttattgagctatcatgtcgtaagccggtggagaagtccagggctagtgtgggggctccggcgggggctgtggcccccatccgcatggagcctccccacggttcacaggtctcggtcttcggagccttcagccccgtgagcccgaacagtccacacggcggcgccagaccctcttcccaacgccaccctctgaagcctccgctccaaccgt

SEQ ID NO: 48217 - DNA, 438 bp, Homo Sapiens
atgactagcatttatttttttcagcagaataatcacactatgaattatttcctattgaaaaatctccttttcctaaaacttcatttgaacaccattgtttctacatacttctctttgttttcatgcaactcttctttagaggcaatgtggactttagatctctgggaaagggcataccggaggattttactggcctttgtgacagataagtgttgtcagaatatttggtggctgtgtgtcaggggcttgggcctctctgttatgcaattgtgtcactctgaggctctctacttgagggaatgtttgtttccatttttaatcaacctgggacaaggcgaatcctgcctctcaaagggttgtagaaaatacttccttggtctgttgggccatggagtacctctgaagatgtctgcacattccttaagcagctggctctga

SEQ ID NO: 48218 - DNA, 702 bp, Homo Sapiens
atgtacacaaaccaggccgaacaatgcctcaaaatatctgccagtttacattcccaaagtcccgagcatctctcacctatgttaacccaaggtgcccagctctgcgaaaagcagcacacaaaagcaatagagctgcttcaggaattttcagatcagcatcaagaaaatgcaattgaaattaagctgaccatggcacagttgaaaatttctcaagagaatatttctgcatgtctaatattgagaagcagagaggagttaaagcagaaaccaggcatggtgtctgcattagtgaccatgtgtagccatgaagaagatttaagtaccactgatgtcttcacacaagctatctggtggtatcaaaaccatcagctcaaatctcctgctcatttgtccttgataaaagaagctgcaaacttcaagctcaaatatgggcgggaggaggcaattagtgacctagaacagctatggaaacaaaatccaaaagatattcataccctggcacagtttatttctgcttactcacttgcagatccagagaaaggcacagctcttagtaaacatttgccatcatcagatagtatgtctctaaaagtagatgttgaggctcttgaaaattctcctggtgctacatacatttggaagggtggaaaagttactagagatagtcaaccaaaggaacaaggaaagggagatttgaaaaag

SEQ ID NO: 48219 - DNA, 4344 bp, Homo Sapiens
atggcctcggctggtaacgccgccgagccccaggaccgcggcggcggcggcagcggctgtatcggtgccccgggacggccggctggaggcgggaggcgcagacggacgggggggctgcgccgtgctgccgcgccggaccgggactatctgcaccggcccagctactgcgacgccgccttcgctctggagcagatttccaaggggaaggctactggccggaaagcgccgctgtggctgagagcgaagtttcagagactcttatttaaactgggttgttacattcaaaaaaactgcggcaagttcttggttgtgggcctcctcatatttggggccttcgcggtgggattaaaagcagcgaacctcgagaccaacgtggaggagctgtgggtggaagttggaggacgagtaagtcgtgaattaaattatactcgccagaagattggagaagaggctatgtttaatcctcaactcatgatacagacccctaaagaagaaggtgctaatgtcctgaccacagaagcgctcctacaacacctggactcggcactccaggccagccgtgtccatgtatacatgtacaacaggcagtggaaattggaacatttgtgttacaaatcaggagagcttatcacagaaacaggttacatggatcagataatagaatatctttacccttgtttgattattacacctttggactgcttctgggaaggggcgaaattacagtctgggacagcatacctcctaggtaaacctcctttgcggtggacaaacttcgaccctttggaattcctggaagagttaaagaaaataaactatcaagtggacagctgggaggaaatgctgaataaggctgaggttggtcatggttacatggaccgcccctgcctcaatccggccgatccagactgccccgccacagcccccaacaaaaattcaaccaaacctcttgatatggcccttgttttgaatggtggatgtcatggcttatccagaaagtatatgcactggcaggaggagttgattgtgggtggcacagtcaagaacagcactggaaaactcgtcagcgcccatgccctgcagaccatgttccagttaatgactcccaagcaaatgtacgagcacttcaaggggtacgagtatgtctcacacatcaactggaacgaggacaaagcggcagccatcctggaggcctggcagaggacatatgtggaggtggttcatcagagtgtcgcacagaactccactcaaaaggtgctttccttcaccaccacgaccctggacgacatcctgaaatccttctctgacgtcagtgtcatccgcgtggccagcggctacttactcatgctcgcctatgcctgtctaaccatgctgcgctgggactgctccaagtcccagggtgccgtggggctggctggcgtcctgctggttgcactgtcagtggctgcaggactgggcctgtgctcattgatcggaatttcctttaacgctgcaacaactcaggttttgccatttctcgctcttggtgttggtgtggatgatgtttttcttctggcccacgccttcagtgaaacaggacagaataaaagaatcccttttgaggacaggaccggggagtgcctgaagcgcacaggagccagcgtggccctcacgtccatcagcaatgtcacagccttcttcatggccgcgttaatcccaattcccgctctgcgggcgttctccctccaggcagcggtagtagtggtgttcaattttgccatggttctgctcatttttcctgcaattctcagcatggatttatatcgacgcgaggacaggagactggatattttctgctgttttacaagcccctgcgtcagcagagtgattcaggttgaacctcaggcctacaccgacacacacgacaatacccgctacagccccccacctccctacagcagccacagctttgcccatgaaacgcagattaccatgcagtccactgtccagctccgcacggagtacgacccccacacgcacgtgtactacaccaccgctgagccgcgctccgagatctctgtgcagcccgtcaccgtgacacaggacaccctcagctgccagagcccagagagcaccagctccacaagggacctgctctcccagttctccgactccagcctccactgcctcgagcccccctgtacgaagtggacactctcatcttttgctgagaagcactatgctcctttcctcttgaaaccaaaagccaaggtagtggtgatcttcctttttctgggcttgctgggggtcagcctttatggcaccacccgagtgagagacgggctggaccttacggacattgtacctcgggaaaccagagaatatgactttattgctgcacaattcaaatacttttctttctacaacatgtatatagtcacccagaaagcagactacccgaatatccagcacttactttacgacctacacaggagtttcagtaacgtgaagtatgtcatgttggaagaaaacaaacagcttcccaaaatgtggctgcactacttcagagactggcttcagggacttcaggatgcatttgacagtgactgggaaaccgggaaaatcatgccaaacaattacaagaatggatcagacgatggagtccttgcctacaaactcctggtgcaaaccggcagccgcgataagcccatcgacatcagccagttgactaaacagcgtctggtggatgcagatggcatcattaatcccagcgctttctacatctacctgacggcttgggtcagcaacgaccccgtcgcgtatgctgcctcccaggccaacatccggccacaccgaccagaatgggtccacgacaaagccgactacatgcctgaaacaaggctgagaatcccggcagcagagcccatcgagtatgcccagttccctttctacctcaacggcttgcgggacacctcagactttgtggaggcaattgaaaaagtaaggaccatctgcagcaactatacgagcctggggctgtccagttaccccaacggctaccccttcctcttctgggagcagtacatcggcctccgccactggctgctgctgttcatcagcgtggtgttggcctgcacattcctcgtgtgcgctgtcttccttctgaacccctggacggccgggatcattgtgatggtcctggcgctgatgacggtcgagctgttcggcatgatgggcctcatcggaatcaagctcagtgccgtgcccgtggtcatcctgatcgcttctgttggcataggagtggagttcaccgttcacgttgctttggcctttctgacggccatcggcgacaagaaccgcagggctgtgcttgccctggagcacatgtttgcacccgtcctggatggcgccgtgtccactctgctgggagtgctgatgctggcgggatctgagttcgacttcattgtcaggtatttctttgctgtgctggcgatcctcaccatcctcggcgttctcaatgggctggttttgcttcccgtgcttttgtctttctttggaccatatcctgaggtgtctccagccaacggcttgaaccgcctgcccacaccctcccctgagccaccccccagcgtggtccgcttcgccatgccgcccggccacacgcacagcgggtctgattcctccgactcggagtatagttcccagacgacagtgtcaggcctcagcgaggagcttcggcactacgaggcccagcagggcgcgggaggccctgcccaccaagtgatcgtggaagccacagaaaaccccgtcttcgcccactccactgtggtccatcccgaatccaggcatcacccaccctcgaacccgagacagcagccccacctggactcagggtccctgcctcccggacggcaaggccagcagccccgcagggacccccccagagaaggcttgtggccacccccctacagaccgcgcagagacgcttttgaaatttctactgaagggcattctggccctagcaatagggcccgctggggccctcgcggggcccgttctcacaaccctcggaacccagcgtccactgccatgggcagctccgtgcccggctactgccagcccatcaccactgtgacggcttctgcctccgtgactgtcgccgtgcacccgccgcctgtccctgggcctgggcggaacccccgagggggactctgcccaggctaccctgagactgaccacggcctgtttgaggacccccacgtgcctttccacgtccggtgtgagaggagggattcgaaggtggaagtcattgagctgcaggacgtggaatgcgaggagaggccccggggaagcagctccaactga

SEQ ID NO: 48220 - DNA, 1267 bp, Homo Sapiens
ggaagtctgtcaactgggagggggagaggggggtgatgggccaggaatggggtccccgggcatggtgctgggcctcctggtgcagatctgggccctgcaagaagcctcaagcctgagcgtgcagcaggggcccaacttgctgcaggtgaggcagggcagtcaggcgaccctggtctgccaggtggaccaggccacagcctgggaacggctccgtgttaagtggacaaaggatggggccatcctgtgtcaaccgtacatcaccaacggcagcctcagcctgggggtctgcgggccccagggacggctctcctggcaggcacccagccatctcaccctgcagctggaccctgtgagcctcaaccacagcggggcgtacgtgtgctgggcggccgtagagattcctgagttggaggaggctgagggcaacataacaaggctctttgtggacccagatgaccccacacagaacagaaaccggatcgcaagcttcccaggattcctcttcgtgctgctgggggtgggaagcatgggtgtggctgcgatcgtgtggggtgcctggttctggggccgccgcagctgccagcaaagggactcaggtaacagcccaggaaatgcattctacagcaacgtcctataccggccccggggggccccaaagaagagtgaggactgctctggagaggggaaggaccagaggggccagagcatttattcaacctccttcccgcaaccggccccccgccagccgcacctggcgtcaagaccctgccccagcccgagaccctgccccagccccaggcccggccaccccgtctctatggtcagggtctctcctagaccaagccccacccagcagccgaggccaaaagggttccccaaagtgggagaggagtgagagatcccaggagacctcaacaggaccccacccataggtacacacaaaaaaggggggatcgaggccagacacggtggctcacgcctgtaatcccagcagtttgggaagccgaggcgggtggaacacttgaggtcaggggtttgagaccagcctggcttgaacctgggaggcggaggttgcagtgagccgagattgcgccactgcactccagcctgggcgacagagtgagactccgtctcaaaaaaaacaaaaagcaggaggattgggagcctgtcagccccatcctgagaccccgtcctcatttctgtaatgatggatctcgctcccactttcccccaagaacctaataaaggcttgtgaagaaaaagcaaa

SEQ ID NO: 48221 - DNA, 411 bp, Homo Sapiens
tcctccaggatgagagtctgtgctaagtcagtgttgctgtcgcactggctctttctagcctacgtgttaatggtgtgctgtaagctgatgtccgcctcaagccagcacctccggggacatgcaggtcaccaccaaatcaagcaagggacctgtgaggtggtcgccgtgcacaggtgctgcaataagaaccgcatagaagagcggtcacaaacggtcaagtgctcttgcttcccgggacaggtggcgggcacaactcgggctcaaccttcttgtgttgaagcttccattgtgattcagaaatggtggtgtcacatgaatccgtgtttggaaggagaggattgtaaagtgctgccagattactcaggttggtcctgtagcagtggcaataaagtcaaaactacgaaggcaagt

SEQ ID NO: 48222 - DNA, 438 bp, Homo Sapiens
atgtggagtttcctcccaggagctgagagcgtgtccatgggcccagtgcctggcgtgtcctccctgggagcttgctggacgcatgaccaggattctgggagggcagaggacagaccacaggcacccaggataactcagtacacatgggttctcagcttcctgttcacagagaaacctcagacaagaagcacgtcgcccatttctcatcaaggccaaccccagaccacgagagcgctttctctgcgtcagccccagcaccccagcgcccctgcctccgggcgcccgcggcctccgcactccagtggcccagacctggctgaggcagctcccgtggtagatcaagcctcacaggcggctggaagagccagttctgggctgggcctgtgggaacaggcgtctgttagtcagggtttcaggaatgcggccttcgaagcctga

SEQ ID NO: 48223 - DNA, 837 bp, Homo Sapiens
atgttatcattaacaagtgcctttatttttcgagttggcattggattattcatcaataccattttttttttctttcaaatctttacatttcttctggatcccaggccaaagttccatgacttgatcatctgccacttggtcctcagtcatattctaatgctccttactgcagtggatttttttcctcaagttgtgtttgaatcactgaatgggaatggctttaaatgtaagctattattttacacaaaaagggtgataagaggcatctccctctgtcccccctggctcttgagtgtgctccaggccatcaccgtcagtcccagaaactcatggttggcaaggtttaaacataaatttacaaattacattaccaatgtttttcttcttttttggttcttcaatttgtcttttagtagcagcctaatcttcttcactgtgtatttttcaaatgtgactcagactgatctattgaatgtcagtaaacactgctcacttttccccatgaacctcatcatcggagtgaaattatccagggatgccttccttgtcagagttatgctgctctcaagtgcattcatgtggatcctctttttcagaaatcagaagcaatcccagctccacagcaccagcatctctccaagaatctcctcagagaaaagggccacccagaccatcctgctgttaagttgctttgtggtcatgtatcctatgaaccttcttatttcaacatcctcaatcctgttatgggtgtatgacccagttgtcctgaatttccggaggcttgtgctcaatgcatatgccactgttattccactgggacaaattagttctgattaa

SEQ ID NO: 48224 - DNA, 438 bp, Homo Sapiens
gtccaaacacacacatctcactcatccttctactcgtgacgcttcccagctctggctttttgaaagcaaagatgagcaacactcaagctgagaggtccataataggcatgatcgacatgtttcacaaatacaccagacgtgatgacaagattgagaagccaagcctgctgacgatgatgaaggagaacttccccaacttccttagtgcctgtgacaaaaagggcacaaattacctcgccgatgtctttgagaaaaaggacaagaatgaggataagaagattgatttttctgagtttctgtccttgctgggagacatagccacagactaccacaagcagagccatggagcagcgccctgttccgggggcagccagtgacccagccccaccaatgggcctccagagaccccaggaacaataaaatgtcttctcccaccag

SEQ ID NO: 48225 - DNA, 2776 bp, Homo Sapiens
agccgggtttgagagcagcccgtctacgtgcagttggttcccagctgacagacagaatatggggtgggctttgtcaccagcacgctgggtctggcatgcccagctatgctcggaagtgcaccgtgcccagacacccgccacctctccccgggtcccagctgctctagcaccgaggggccgggctgcacgcctgtccttcctcccatccaggaaggttatataatgagcggaccgctgccaaagtcagagggaaaatgaagtctttgttaaatgccttcaccaagaaggaagtgcccttccgagaggccccggcgtactccaaccgccggcggcggccccccaacacgctggccgccccccgggtcctgctgcgctccaacagtgacaacaacctcaatgccagcgctcccgactgggccgtctgctccacggccacctcgcaccgcagcctgtcaccccagctgctgcagcagatgcccagcaagcccgagggggccgcgaagaccattgggagctacgtgcccgggccccgcagccggtccccatcgctcaacaggctgggcggcgcaggcgaggacggcaagaggccgcagcctctctggcatgtcgggtcgccttttgctcttggtgccaacaaggactcactctcggccttcgagtacccggggcccaagcggaagctctacagtgccgtgcccgggaggctcttcgtcgctgtcaagccataccaaccccaagtggacggcgagatcccccttcaccgcggtgacagggtcaaagttctgagcatcggtgaagggggcttctgggaaggcagcgcccgcggccacatcggatggtttccggcggagtgcgtggaggaggtccagtgtaagcccagggacagccaggcagaaacccgcgctgaccgcagcaagaagcttttcaggcactacaccgtgggctcctatgacagcttcgacacttccagggttgcagacacatttgggggtccctgcaaccctcggagacagctggagtctggacctgtagggcctggttgtggaaacagccccgctgcctcctgcccggtggctctggaggccccttccgcacatccagggcgggtcggctgctccagttctgccttcccacccagtgctgggatgtgcaacgccccccaccgaatgctcagatgtgcagccccctcctctgctggcctggaccttggacctcacacgtgcacatgttctgacatcagtgcctcatccgatgtccaaccccggccagaggaaccaccgtcgcttcagccccactctgaccttggaagccccaccctgcatggaggcagaggtgggaactctgtcatccaccgttccccacagaccactcacagccgctttaagagaacagccagggcttctaggcaggagcacgacagtgttcacgctgatggccagggagcctcctcagccagcagcagccgactcgtgcttgtgcattgttcagatggaagcatgatcattggatggaagttcctggcacaggtgcaagttgaccctgagtcattccagaaggattcgggcctcaccggaaagaacgccaggaaaagccatagggcaacagctcttctgccatttcagtcctcatgggtgaaactggggtaaagcgtgagtggctggggccctgctgacacctgcacttgtgcgtcaccgccaagctgtgtccctagactgccctgggtgagtaggcagccaacgtctgcagccccgtgtggtcagctgctcctgccctcccgcctcatcacggcccttcagacatcagggccggctgcctaccttccaaccccactctgtctggaatgttcttttctcttctgtcccctccccagtcctccaacccattctcctatgtatacttcagtcctcctcctccaggaagtcttccaggtgcccgtatggttctcacagaaccacgtcctgcactgttgaaggcacacatttctgtgactgtggattgatgtttatcttcctcacttgcccggcctttgctctaacgatcaccacagactagggggctcaaaacaagagaagtcacttacctgtcacagccctggaggccagaggtccaaaaccaagatgacagcagggccacgctccctccgggggctccaggggagagtcttcctcctccacctctgctgttggcctgcagtccttggtgctcctcagctgggccacatcactccagcctccacatcactccagcctctgcctccaccttcccatggcctcctctgcactgcctctgggtgtcaacctccctctgcttttctcgcgtaagggcacagtcattggtttaggaccctccctaaatccaggaagatctcaactcaagacccttaactaattatacctgcaaagacccaaattccaagtgtcgtcactttcacagacgctgggggttaggaattggacacatttttttgggtgggttgagtcaccattcaactgaccacaccagacaactctataaggaccagactgggcctggtttgttccttcctaaatgcccagcacccagttcatcccctgactctcagtgggtattcaggatgtaacagctggattgatttattgatttacacggcggcttgacactggccccagttacttctgaactttgaaacccagtcccagctggtcacggaagaactaaagctgtcaccagacggggccaccaacccagctgggatcctgagagctatgagtaaagccatctggtctaccccaataac

SEQ ID NO: 48226 - DNA, 813 bp, Homo Sapiens
tgggatgacatggagaagatctggcaccacaccttctacaatgagctgcatgtggctttcgaggagtaccctgtgctgctgaccaaaggccccctgaatcccaaggccaaccatgagaagatggcccagattatgttggagaccttcaacaccccacccatgcacgtggccatccaggtcgtgctgtacctgtactcctctggccataccactggcatcgtgatggactctggcgacgtcacccacattgtgtgcatatatgaggggcacgccctcccccacaccatcctgcgtctggatctcgctggccaggacctgaccgaccgccttatgaagatcctcacattgtgcggctacagctttaccaccgcagagggagagctcctgtgtgacatcatcaaggagaagctgtgctcgccctggactttgagcaggagatggccccacgggtcctcctgggagaagagctatgagctgtcagatggccaggtcatcaccagcagcaacaagcggttccactgccccgaggcgctcttccagccttctttcctgggcatggaatcctgtggcatctacaaaactaccttcaaatccatcgtgaagtgtgacgtggacatccacaaagacctgtacgccaacacagtgctatctggcagcaccaccatgtaccctggcatcgctaggatgcagagggggatcactgccctggctcccagcatgaggaggatcaagatcattgctccttctgagtgcacatactcttggatgcgtggctccatcctgacctcgttgtccaccttccagcagttatgg

SEQ ID NO: 48227 - DNA, 948 bp, Homo Sapiens
ctggaagagcagcagaatcaggcccagctcccaattccctctccccagtcttctccaggtgtcccctcccatgagcgcacaggaaaaggaccacatggcctggcgagccctacacccactgctactgctgctgctgctgttcccaggctctcaggcacaatccaaggctcaggtacttcaaagtgtggcagggcagacgctaaccgtgagatgccagtacccgcccacgggcagtctctacgagaagaaaggctggtgtaaggaggcttcagcacttgtgtgcatcaggttagtcaccagctccaagcccaggacgatggcttggacctctcgattcacaatctgggacgaccctgatgctggcttcttcactgtcaccatgactgatctgagagaggaagactcaggacattactggtgtagaatctaccgcccttctgacaactctgtctctaagtccgtcagattctatctggtggtatctccagcctctgcctccacacagacctcctggactccccgcgacctggtctcttcacagacccagacccagagctgtgtgcctcccactgcaggagccagacaagcccctgagtctccatctaccatccctgtcccttcacagccacagaactccacgctccgccctggccctgcagcccccattgccctggtgcctgtgttctgtggactcctcgtagccaagagcctggtgctgtcagccctgctcgtctggtggggggacatatggtggaaaaccatgatggagctcaggagcctggatacccaaaaagccacctgccaccttcaacaggtcacggaccttccctggacctcagtttcctcacctgtagagagagaaatattatatcacactgttgcaaggactaagataagcgatgatgatgatgaacacactttgtgaataataaaattatctgaatgttt

SEQ ID NO: 48228 - DNA, 1256 bp, Homo Sapiens
cttagagggagctgtgttttggtgacctctgaaactcagtactgcagcgaatgagctcctgaccttgaggagtacttaacagaattatgtctcgaagaatcattgtgggaacccttcaaagaacccagcgaaacatgaattctggaatctcgcaagtcttccagagggaactcacctgccccatctgcatgaactacttcatagacccggtcaccatagactgtgggcacagcttttgcaggccctgtttctacctcaactggcaagacatcccaattcttactcagtgctttgaatgcataaagacaatacagcagagaaacctcaaaactaacattcgattgaagaagatggcttcccttgccagaaaagccagtctctggctattcctgagctctgaggagcaaatgtgtggcattcacagggagacaaagaagatgttctgtgaagtggacaggagcctgctctgtttgctgtgctccagctctcaggagcaccggtatcacagacactgtcccgctgagtgggctgctgaggaacactgggagaagcttttaaagaaaatgcagtctttatgggaaaaagcttgtgaaaatcagagaaacctgaatgtggaaaccaccagaatcagccactggaaggcttttggagacatattatacaggagtgagtccgtgctgctgcacatgccccagcctctgaatctagcgctcagggcagggcccatcactggactgagggacaggctcaaccaattcgatattactctgcatcacaatgaagccaacagtcatatcttccgatgtggagatttgagaagcatttgtattggatgtgaccgtcaaaatccgccccatatcactgcaacacctacaagttttcttgcatggggtgctcagactttcacctctggcaaatattactgggaggtccatgtgggggactcttggaattgggcttttggtgtctgtaataagtattggaaagggaagaatcagaatggcaatatatatggagaggagggactctttagtcttgggtgtgttaagaacgacattcagtgcagtctctttaccacctccccaattacactgcagtatgtcccaagacctaccaaccatgtagaattattcctggattgtgaagctagaactgtgagcttcgttgatgttagtcaaagctcccctatatacaccatccctaattgctccttctcacttcctctcagacctatctttttctgtattctcctctga

SEQ ID NO: 48229 - DNA, 582 bp, Homo Sapiens
gggaaagcgaggagccgcggcggcgtggagccggcgggcccgggcgggggctccccggagccctaccaccccaccctgggcatctacgcccgctgcatccggaacccaggggtgcagcacttccagcgggacacgctgtgcgggccctacgccgagagcttcggcgagatcgccagcggcttctggcaggccacagctattttcctggctgtgggaatctttattctctgcatggtggccttggtgtccgtcttcaccatgtgtgtacagagcatcatgaagaaaagcatcttcaatgtctgtgggctgttgcaaggaattgcaggtctattccttatcctcggtttgatactctaccctgctggctggggttgccagaaggccatagactactgtggacattatgcatctgcctacaaacctggagactgctccttgggctgggccttttataccgccattgggggcacagtcctcactttcatctgtgctgtcttctctgcacaagcagaaattgcaacctctagtgacaaagtacaggaagaaattgaagaggggaaaaatctgatctgcctcctttag

SEQ ID NO: 48230 - DNA, 555 bp, Homo Sapiens
atgttgcagatggctgggcagtgctcccaaaatgaatattttgacagtttgttgcatgcttgcataccttgtcaacttcgatgttcttctaatactcctcctctaacatgtcagcgttattgtaatgcaagtgtgaccaattcagtgaaaggaacgaatgcgattctctggacctgtttgggactgagcttaataatttctttggcagttttcgtgctaatgtttttgctaaggaagataaactctgaaccattaaaggacgagtttaaaaacacaggatcaggtctcctgggcatggctaacattgacctggaaaagagcaggactggtgatgaaattattcttccgagaggcctcgagtacacggtggaagaatgcacctgtgaagactgcatcaagagcaaaccgaaggtcgactctgaccattgctttccactcccagctatggaggaaggcgcaaccattcttgtcaccacgaaaacgaatgactattgcaagagcctgccagctgctttgagtgctacggagatagagaaatcaatttctgctaggtaa

SEQ ID NO: 48231 - DNA, 1225 bp, Homo Sapiens
gctgccgtatcccaggctaagcgccgcgcgcaaagccgtgcggagattggaggccgcgcgggtccctggtctgggccatgtctggctgtgatgctcgggagggagactgttgttcccggagatgcggcgcgcaggacaaggagcatccaagatacctgatcccagaactttgcaaacagttttaccatttaggctgggtcactgggactggaggaggaattagcttgaagcatggcgatgaaatctacattgctccttcaggagtgcaaaaggaacgaattcagcctgaagacatgtttgtttgtgatataaatgaaaaggacataagtggaccttcgccatcgaagaagctaaaaaaaagccagtgtactcctcttttcatgaatgcttacacaatgagaggagcaggtgcagtgattcatacccactctaaagctgctgtgatggccacacttctctttccaggacgggagtttaaaattacacatcaagagatgataaaaggaataaagaaatgtacttccggagggtattatagatatgatgatatgttagtggtacccattattgagaatacacctgaggagaaagacctcaaagatagaatggctcatgcaatgaatgaatacccagactcctgtgcagtactggtcagacgtcatggagtatatgtgtggggggaaacatgggagaaggccaaaaccatgtgtgagtgttatgactatttatttgatattgccgtatcaatgaagaaagtaggacttgatccttcacagctcccagttggagaaaatggaattgtctaagccaaaagaaagtctaattatatacagagataaagctaaacgtaattattatttaaatgaaagctatttttttaaatgaattgaaatttttcatgatgctactaatttgccactaaatactgcaaatggtcaccctgaatctcttctgacattggatgttatttgcttatattcttataattttaaatgagggcacagtgaaatgaaaattttatactctatgtttctgtttatttttaaatccttaacagcaaaatatttgcctttaatttcttttttatatatactctcagagaattcctcttaatttttaaagatgctggtgataataaaattcattagaaaatttcctcattgtggaatgagcattctcttgttttaatgttggtgtcagaaaataaatatgaaacattaagtcc

SEQ ID NO: 48232 - DNA, 1483 bp, Homo Sapiens
ttttcaatctttttgatctcacgaccactttttaaaaaatgtatatctttttttgtgtgttgttcttgttgttgttgttgtttgagacagggtcttgctctgtcgcccaggctggagtgcagtggcactaacgtggctcatgccgcctcaacctcctagactcaagtgaccctccctcctcagcctcccaagtatctgggatcaaaggtgtgaaccaccaggcctggctaatttttttttattttttgtagagatgacatttctccatgttgcccaggctggtttcaaactcctgggctcaagcaagcctcaccctcccaaagtggtgggattacaagtatgagccaccacacctggccaggaccactggacactcttaaaaatgatgaaagacttcatggagaagcttgtattcatgtggattatagctatcaattgttactgtattagacatttaaaagaaaatagaaatgaggaaaatgaatttatttaaaaatagtaaacccaaatacatgtgaacataaatcacatttttatgaaaagatcactattttccacaattaaaaattgaggtttatgtagtttttgagatctctttaatgtctggcataatagaatacagctggattctcatgtatgcttctgcacaatcttttgtgatttttttttctttttttttgagacggagtcttgctctgtcacccaggctggagtgcagtggtgccatctcagctcagtgcaacctccactgccggggttcaagcgattatcctgcctcccgcatgaaatggggttttgccatgttggccaggcttgtctcgaactcctgacctcaggtgagccactgtgtccggccctgttgtggtatgttgaagtatataaagaaaatccaggttcacacggatacatatttttaaatggagaaatattggaatagccttttcagataattatggatattcttctttgatactgtacaaaatttggcaagtgatagttccttcaaagatagctgcagtgtggaatctgaaatcctatcaaggaagtttttgtactctgttaaactaaaaatccactgatccgttttacactttatttatgtgaagagtggtaacttttacccatgcatgattttgtaatatcctgtattggtcatttggaaaatactggtttactgaattatgcagttcttccaaatattgacacatttctttatataaatatcaagtcacatttgttaatatcacaactgatatcagaaaagtcccatggtaaatgcaaatttcacaaaattctaatgtttccttggaatcttgaattttatcattggcaacaaatacagttttccttgaaatgacagcctcactttttttaatttttgagtgagaagatacctgccaaatattcaagtctgaatggcgattgcttaccagtcattctttcatgttaaaatggtcttcctccatttaaaaaaaaaaaaaaa

SEQ ID NO: 48233 - DNA, 2061 bp, Homo Sapiens
atgaagccaccatttcttttggcccttgtggtctgttctgtagtcagcacaaatctgaagatggtgtcaaagagaaattctgtggatggctgcattgactggtcagtggatctcaagacatacatggctttggcaggtgaaccagtccgagtgaaatgtgcccttttctacagttatattcgtaccaactatagcacggcccagagcactgggctcaggcttatgtggtacaaaaacaaaggtgatttggaagagcccatcatcttttcagaggtcaggatgagcaaagaggaagattcaatatggtttcactcagctgaggcacaagacagtggattctacacttgtgttttaagaaactcaacatattgcatgaaggtgtcaatgtccttgactgttgcagagaatgaatcaggcctgtgctacaacagcaggatccgctatttagaaaaatctgaagtcactaaaagaaaggagatctcctgtccagacatggatgactttaaaaagtccgatcaggagcctgatgttgtgtggtataaggaatgcaagccaaaaatgtggagaagcataataatacagaaaggaaatgctcttctgatccaagaagttcaagaagaagatggaggaaattacacatgtgaacttaaatatgaaggaaaacttgtaagacgaacaactgaattgaaagttacagctttactcacagacaagcctcccaagccattgttccccatggagaatcagccaagtgttatagatgtccagctgggtaagcctctgaacatcccctgcaaagcattcttcggattcagtggagagtctgggccaatgatctactggatgaaaggagaaaagtttattgaagaactggcaggtcacattagagaaggtgaaataaggcttctcaaagagcatcttggagaaaaagaagttgaattggcactcatctttgactcagttgtggaagctgacctggcgaattatacctgccatgttgaaaaccgaaatggacggaaacatgccagtgttttgctgcgtaaaaaggatttaatctataaaattgagcttgcagggggcctgggagcaatcttcctcctccttgtactgctggtggtcatttacaaatgctacaacattgaattgatgctcttctacaggcagcactttggagctgatgaaactaatgatgacaacaaggaatatgatgcctatctctcttacacaaaagtggaccaagatactttagactgtgacaatcctgaagaagagcagtttgctcttgaagtactgccagatgtcctggaaaaacactatggatataaactcttcatcccagaaagagacctgattccaagtggaacatacatggaagatctcacaagatatgttgaacaaagcagaagacttattatcgtgctaactccagactatattctcagacggggatggagtattttcgaactggaaagcagactccataacatgctagtcagtggagaaatcaaagtgattttgattgagtgtacagaattaaaagggaaagtgaattgccaggaagtggaatcactaaagcgtagcatcaaacttctgtccctgatcaagtggaagggatccaaaagcagcaaattaaattctaagttttggaagcacttagtatatgaaatgcccatcaagaaaaaagaaatgctacctcggtgccatgttctggactccgcagaacaaggactttttggagaactccagcctataccctctattgccatgaccagtacttcagccactctggtgtcatctcaggctgatctccctgaattccacccttcagattcaatgcaaatcaggcactgttgcagaggttataaacatgagataccagccacgaccttgccagtaccttccttaggcaaccaccatacttattgtaacctgcctctgacgctactcaacggacagctaccccttaataacaccctgaaagatacccaggaatttcacaggaacagttctttgctgcctttatcctccaaagagcttagctttaccagtgatatttggtag

SEQ ID NO: 48234 - DNA, 1973 bp, Homo Sapiens
atggctatgagttcttttttgatcaactcaaactatgtcgaccccaagttccctccatgcgaggaatattcacagagcgattacctacccagcgaccactcgcccgggtactacgccggcggccagaggcgagagagcagcttccagccggaggcgggcttcgggcggcgcgcggcgtgcaccgtgcagcgctacgcggcctgccgggaccctgggcccccgccgcctccgccaccacccccgccgcccccgccaccgcccggtctgtcccctcgggctcctgcgccgccacccgccggggccctcctcccggagcccggccagcgctgcgaggcggtcagcagcagccccccgccgcctccctgcgcccagaaccccctgcaccccagcccgtcccactccgcgtgcaaagagcccgtcgtctacccctggatgcgcaaagttcacgtgagcacggtaaaccccaattacgccggcggggagcccaagcgctctcggaccgcctacacgcgccagcaggtcttggagctggagaaggaatttcactacaaccgctacctgacacggcgccggagggtggagatcgcccacgcgctctgcctctccgagcgccagatcaagatctggttccagaaccggcgcatgaagtggaaaaaagaccacaagttgcccaacaccaagatccgctcgggtggtgcggcaggctcagccggagggccccctggccggcccaatggaggcccccgcgcgctctagtgcccccgcacgcgggagccacgaacctcggggtgggggtgggcagtgagtgcaggggatggggtggggggacaggagggggccctggggcctgggccccggaaaaatctatctgccctcccccacactttatatacgaataaacgcagaagagggggaggggaagctttatttatagaaatgacaatagagggccacggggaggcccccccagaagcaagattcaaatctcttgctttctttcttaaaaaaaagaaaaagaaaaagcaagaagaaggaagaaagaaaaagacagaaagagaaataggaggaggctgcagctcctcgttttcagctttggcgaagatggatccacgtttcatctttaatcacgccaggtccaggcccatctgtcttgtttcctctgccgaggagaagacgggcctcggtggcgaccattacctcgacacccgctaacaaatgaggcccggctcggccgcctccgcctctgctactgccgctgctggaagacagcctggatttcctttctttgtcccccactcccgatacccagcgaaagcaccctctgactgccagatagtgcagtgttttggtcacggtaacacacacacactctccctcatctttcgtgcccattcactgagggccagaatgactgctcacccacttccaccgtggggttgggggtgggcaacagaggaggggagcaagtagggaagggggtggccttgacaactcaggagtgagcaggaaaattgagtccaaggaaaaagagagactcagagacccgggagggccttcctctgaaaggccaagccaagccatgcttggcagggtgaggggccagttgagttctgggagctgggcactactctgccagtccagagttgtacagcagaagcctctctcctagactgaaaatgaatgtgaaactaggaaataaaatgtgcccctcccagtctgggaggaggatgttgcagagccctctcccatagtttattatgttgcatcgtttattattattattgataatattattattactatttttttgtgtcatgtgagtcctctctccttttctctttctgacattccaaaaccaggccccttcctacctctggggctgcttgagtctagaacccttcgtatgtgtgaatatctgtgtgctgtacagagtgacaatagaaataaatgtttggtttcttgtgaccagcaca

SEQ ID NO: 48235 - DNA, 584 bp, Homo Sapiens
gtttgcgcgccttggtgagccgttggcgtggtggtcccggagtgatcctggcagccggtggggaagacaaggagggtttgagcatggcagaaggaaacaccctgatatcagtggattatgaaatttttgggaaggtgcaaggggtgtttttccgtaagcatactcaggctgagggtaaaaagctgggattggtaggctgggtccagaacactgaccggggcacagtgcaaggacaattgcaaggtcccatctccaaggtgcgtcatatgcaggaatggcttgaaacaagaggaagtcctaaatcacacatcgacaaagcaaacttcaacaatgaaaaagtcatcttgaagttggattactcagacttccaaattgtaaaataatggcctgaatttaagttttctaagataaactcagtggtttggtttttattattaatagagatagaactattgtgtgttaatattagcattagtcaataagttattttaatgtcagatttttgaatgttattatatattacctgtatgatggaaggattaccactgtacacaaatctaatcaataaaaacgttagaaccttc

SEQ ID NO: 48236 - DNA, 299 bp, Homo Sapiens
tttttatggatacttgtaaaatatttttctttgatttacctgagttcactaatgtctgcttctggtatttcccagcaaggcttaaacatattccaaaaggttttgaaagagatcaagaactccgaaagattgctccaaagattaaagcacagatgatgatggaaggcacaatcatgataagctaccagccatgtggagacaaagtaaatattttgcgaatggtttctaatcctgcctcaagacagaaagatgttgactatcttattgatgaaattgaaaggcttgggaaggatttatga

SEQ ID NO: 48237 - DNA, 699 bp, Homo Sapiens
attgtttccagaattaaagtgtttgagggtcagacaaacatagaaacctcaggactgcccaagaaaccagaaattactccacgttcacttcctccaaagcctactgtttcctcagggaaaccttctgtagctcccaaaccagctgctaacagagcttctggagagtgggactctgggactgagaacagactcaaggtgacctccaaggaaggactcaccccataccctcccctgcaagaagcgggaagcatcccagtaaccaaacctgaattgccaaagaaaccaaaccctggccttatacgaagtgttaatcctgagattccgggaagagggcccctggctgagagctctgatagtgggaagaaagtgccaactcctgccccgcggcctttgctgctgaagaaatctgtttcctcagaaaaccccacctacccttcagctccactgaaacctgtcactgttcctccccgactcgcaggggcatcacaagccaaagcatacaagtcactgggagaagggcccccagccaaccccccagttccagttctgcagagcaagcccttggtggacatcgatctcatcagctttgatgatgatgttttgcccaccccatcggggaacctggctgaagaatctgttggttcagagatggttctagatccctttcagctccctgcaaaaacagaaccaataaaagaa

SEQ ID NO: 48238 - DNA, 446 bp, Homo Sapiens
gcccacggcccaaggagcgtgagtcaccacccccttcggccctgcagccggtccagctgcctcgcctggccttggacttcctgcgggcccagcaggagactgccaacgccatccgggagctggccggcacccttcgacagggactggccaaactgagcgaggccctcagcgctctgctgccccttctgccaggaaccccagttgactcgcctgtcctgcccccaccggcccccaaggtggagatcaccccagagcccgtgtccgtggtggctgctgtggtggacggggcagtggtggcagccaggggagtgatcattgccccaaggagcgaggagggggcaccccggccccccccagccccgctccctccgcacgactcccccccacacaagcggagaaaaggtttccctacacggaaaaggcgcggccgatggaaatctccgtga

SEQ ID NO: 48239 - DNA, 903 bp, Homo Sapiens
aatcacacaatggtgactgaattcatccttctgggaatccctgagacagagggcctagagacagcccttttattcctgttctcctcattttatttatgcaccctcttgggaaacgtgcttatccttacagctatcatctcctccactcgacttcacactcctatgtattttttcttgggaaacctctccatctttgacctgggtttctcttcaacgactgttcccaagatgttgttctacctttcggggaacagccatgctatctcgtatgcaggctgcgtgtcccagcttttcttctaccatttcctaggctgtactgagtgtttcctctacacagtgatggcctgtgaccgctttgttgccatatgttttcctttgagatacacggtcatcatgaaccacagggtgtgctttatgttggccacggggacctggatgattggctgtgtccatgccatgatcctaactcccctcaccttccagttaccttactgtggccctaacaagatccagcactacttctgtgacgcaccgcccatcctgaaactggcctgtgcagacacctcagccaacgagatggtcatctttgtgaatattgggctagtggcctcgggctgctttgtcctgatagtgctgtcctatgtgtccatcgtctgttccatcctgcggatccgcacctcagaggggaggcacagagcctttcagacctgtgcctcccactgtatcgtggtcctttgcttctttggccctggtcttttcatttacctgaggccaggctccagggacgccttgcatggggttgtggccgttttctacaccacgctgactcctcttttcaaccctgttgtgtacaccctgagaaacaaggaggtaaagaaagctctgttgaagctgaaaaatggg

SEQ ID NO: 48240 - DNA, 3102 bp, Homo Sapiens
atggcggagtccggcggtagcagcggtggtgctggtggcggcggcgctttcggcgcgggcccgggccccgagcgcccgaacagcacggccgacaagaacggggccctcaagtgcaccttctcggcacccagccacagcaccagcctcctgcagggcctggccaccctccgcgctcagggccagctcctcgatgttgtgctgactattaacagagaggcctttcctgcacacaaggtcgtcctggctgcctgcagcgactacttcagggccatgttcaccggcggcatgcgggaggcaagccaggacgtcatcgagctgaagggcgtgtcggcccgtggcctgcggcacatcatcgacttcgcctacagcgccgaggtgacactggacctggactgcgtgcaggacgtgctgggcgcggccgtgttcttgcagatgctgcccgtggtggagctgtgcgaggagttcctgaaggcggccatgagcgtggagacctgcctcaacatcggccagatggccaccaccttcagcctggcctcgctgcgagagtcggtggatgccttcaccttccggcacttcctgcagatcgccgaggaggaggatttcctgcgcctgccactggagcgcctggtcttcttcctgcagagcaaccggctgcagagctgtgccgagatcgacctgttccgcgcggccgtccgctggctgcagcatgacccggcccggcggccgcgcgccagccacgtgctctgccacattcgcttcccgctcatgcagtcgtccgagctggtggacagcgtgcagacgctggacatcatggtggaggacgtgctgtgccgccagtatctgctggaggccttcaactaccaggtgctgcccttccggcagcacgagatgcagtctccgcgcaccgccgtgcgctcggatgtgccctcgctcgtcaccttcggcggcacgccctacaccgacagcgaccgctcggtcagcagcaaggtctaccagctgcctgagccgggagcccgccacttccgcgagctcacggagatggaggtaggctgcagccacacgtgcgtggccgtgctggacaattttgtgtacgtggccggggggcagcacctgcagtaccgcagcggcgagggcgcagtggacgcctgctaccgctacgacccccacctgaatcgctggctgcgcctgcaggccatgcaggaaagccgcatccagttccagctgaacgtgctgtgcggcatggtgtacgccacgggcggccgcaaccgagccggcagcctggcctccgtggagcggtactgcccccggcgcaatgagtggggctacgcctgctcgctgaagcgccgtacctggggccatgctggggccgcctcagggggccgcctctacatctcgggtggctacgggatctcagtggaggacaagaaggccctgcactgctacgaccccgtggccgaccagtgggagttcaaggcgcccatgagcgaaccccgcgtgctacacgccatggtgggtgccggcggccgcatctatgccctcgggggccgcatggaccacgtggaccgctgcttcgacgtgctggctgtggagtactatgtgccggagacggaccagtggaccagcgtgagccccatgcgggccggccagtcagaggccggctgctgcctgctggagaggaagatctacatcgtcgggggctacaactggcgtctcaacaacgtcacgggcatcgtacaggtgtacaacacggacaccgacgagtgggagcgggacctgcacttcccggagtccttcgcaggcatagcctgcgcccccgtcctgctgccccgggccgggaccaggaggtagcccccaagacccccgggaccctggcctgaccgcatgttgtctccaagtggggcttggcgaatgcacgtctgcctgagaaccccagtgccccccttcgcccgggctgcccttgaggggcctgctgcgttgataagcccccctcccaggggtccctccctccctccttcccaaagcagatcctggctgcgagtccatccgagggagcctgccggcaaagcgtctgacatgtggtggcagcaaattcgtccccggggtggtttcctcgcctggcccccgagtccccacgggctggcgggtggaatcccaggtctccagggggtccctgtgcagctccatctcacttctctactgcctcccagccccacggtttcaggcattcagatgtgagctcatcaacattgaacccaaagtcggtggtatatgactcaccctccttccaagtctcctgcgcgcgtgtttttaaaataaactcacccgaaacgtccgtaacacacggacctccaggagcagtgagaggtggcttagaagcccctggtttggggtgggtggaggaggagggcacgtgtctgcctcccctggggtgccctccttcccccatcccaagctgctgaggggaggccctggtcatgcctcagttcctgccttcatctgctttccggaggaaaaaccatatcaactcctagaaacgctccttaggggcttgggaccttccatttggcactgagcatcttgtggggccttaactggctgagacatcccggccctctacatttgccctgttggccaggcagtccccttcccgcaattggagggcgacgctaacttcagaatcccatagtggcgcttgccgcaggtctggtggggtgtcttttttctcctccctcctttccacccctccgcgccctgccactccctggcctgccctgtttttgggtcaacattgctacggagccagcagtgaggcctttcccttcaagggctctgtggtatctctggccacatttgttctaatgtctgaacctctaaatcttttctttttgattggttttactgtttttaagaagccagcactgctgtctcatagatgggatttgtactcttggggcaacttaaagtgtctctctcgctgctaacagacgattgatgtcttgtctctgtgacccactcaccatgtaaagaattaacctcctatcttagcagacatcgtctcctaatatttccctttatttaataaaaatgttatggtgaagagat

SEQ ID NO: 48241 - DNA, 3469 bp, Homo Sapiens
ggctgcagcacgcggtgcacgaggcagagcccacaagccaaagacggagtgggccgagcattccggccacgccttccgcggccaagtcattatggcagccactgagatctctgtcctttctgagcaattcaccaagatcaaagaactcgagttgatgccggaaaaaggcctgaaggaggaggaaaaagacggagtgtgcagagagaaagaccatcggagccctagtgagttggaggccgagcgtacctctggggccttccaggacagcgtcctggaggaagaagtggagctggtgctggccccctcggaggagagcgagaagtacatcctgaccctgcagacggtgcacttcacttctgaagctgtggagttgcaggatatgagcttgctgagcatacagcagcaagaaggggtgcaggtggtggtgcaacagcctggccctgggttgctgtggcttgaggaagggccccggcagagcctgcagcagtgtgtggccattagtatccagcaagagctgtactccccgcaagagatggaggtgttgcagttccacgctctagaggagaatgtgatggtggccagtgaagacagtaagttagcggtgagcctggctgaaactactggactgatcaagctcgaggaagagcaggagaagaaccagttattggctgaaagaacaaaggagcagctcttttttgtggaaacaatgtcaggagatgaaagaagtgacgaaattgttctcacagtttcaaattcaaatgtggaagaacaagaggatcaacctacagctggtcaagcagatgctgaaaaggccaaatctacaaaaaatcaaagaaagacaaagggagcaaaaggaaccttccactgtgatgtctgcatgttcacctcttctagaatgtcaagttttaatcgtcatatgaaaactcacaccagtgagaagcctcacctgtgtcacctctgcctgaaaaccttccgtacggtcactctgctgcggaaccatgttaacacccacacaggaaccaggccctacaagtgtaacgactgcaacatggcatttgtcaccagtggagaactcgtccgacacaggcgctataaacatactcatgagaaaccctttaaatgttccatgtgcaagtatgccagtgtggaggcaagtaaattgaagcgccatgtccgatcccacactggggagcgcccctttcagtgttgccagtgcagctatgccagcagagatacctacaagctgaaacgccacatgagaacgcactcaggtgagaagccttacgaatgccacatctgccacacccgcttcacccagagcgggaccatgaaaatacatattctgcagaaacacggcgaaaatgtccccaaataccagtgtccccattgtgccaccatcattgcacggaaaagcgacctacgtgtgcatatgcgcaacttgcatgcttacagcgctgcagagctgaaatgccgctactgttctgctgtcttccatgaacgctatgccctcattcagcaccagaaaactcataagaatgagaagaggttcaagtgcaaacactgcagttatgcctgcaagcaggaacgtcatatgaccgctcacattcgtacccacactggagagaaaccattcacctgcctttcttgcaataaatgtttccgacagaagcaacttctaaacgctcacttcaggaaataccacgatgcaaatttcatcccgactgtttacaaatgctccaagtgtggcaaaggcttttcccgctggattaacctgcacagacattcggagaagtgtggatcaggggaagcaaagtcggctgcttcaggaaagggaagaagaacaagaaagaggaagcagaccatcctgaaggaagccacaaagggtcagaaggaagctgcgaagggatggaaggaagccgcgaacggagacgaagctgctgctgaggaggcttccaccacgaagggagaacagttcccaggagagatgtttcctgtcgcctgcagagaaaccacagccagagtcaaagaggaagtggatgaaggcgtgacctgtgaaatgctcctcaacacgatggataagtgagagggattcgggttgcgtgttcactgcccccaattcctaaagcaagttagaagtttttagcatttaaggtgtgaaatgctcctcaacacgatggataagtgagagagagtcaggttgcatgttcactgcccctaattcctaaagcaagttagaaatttttagcattttctttgaaacaattaagttcatgacaatggatgacacaagtttgaggtagtgtctagaattgttctcctgtttgtagctggatatttcaaagaaacattgcaggtattttataaaagttttaaaccttgaatgagagggtaacacctcaaacctatggattcattcacttgatattggcaaggtggcccacaatgagtgagtagtgatttttggatatttcaaaatagtctagaccagctagtgcttccacagtcaaagctggacatttttatgttgcattatatacacccatgatatttctaataatatatggttttaaacattaaagacaaatgtttttatacaaatgaattttctacaaaatttaaagctaccataatgcttttaattagttctaaattcaaccaaaaaatgttttactcttataaaaaggaaaactgagtaggaaatgaaatactagattagactagaaaataaggaataaatcgattttactttggtataggagcaaggttcacctttagatttttgtattctcttttaattatgctccttggcaggtatgaaattgccctggttacattccattattgcttattagtatttcactccataacccttttttctgctaaaactactctttttatatttgtaaaataattggcagagtgagaagaaacataaaatcagataaggcaaatgtgtacctgtaaggaatttgtactttttcataatgcccagtgattagtgagtatttcccttttgccagttgacaagatttttccaccctcgagcagcgtgagagatgcctctttaacacttgaaattcatttctatctggatacagaggcagatttttcttcattgcttagttgagcagtttgttttgctgccaacctgtctccacccctgtatttcaagatcattgataagccctaaattcaaattcttaagatatggaccttttattgaaaatatcacaagttcagaatccctatacaatgtgaatatgtggaaataatttcccagcaggaagagcattatattctctttgtaccagcaaattaatttaactcaactcacatgagatttaaattctgtgggctgtagtatgccatcattgtgactgaatttgtgcaatggtttcttaatttttttactgttatttaaagatgttttacataattcaataaaatgaaatgacttaaaattgctata

SEQ ID NO: 48242 - DNA, 927 bp, Homo Sapiens
ggtttcgaggctccaggggccagcaaaagctctctactccctagaatgtctgtctcccaagatccaagaaagctgtgtcttatggaggaggttgttagtgaatttgagcctggaatggccatgaagtcagagacccagcctcaagtttctgccgctgttgtgctccttccagatgggcaagcatctgttctgccccatgcttcagagaatttggcttctcaagtgccccagggccatctccagagcatgcctactgggaacatgcaggcttcccaggggctatgtgacctcatggcagccagaaggagcaacctgaggcacaaggagcccaggaacccaaactgtcaaggctcatgcaagagccaaagcccaatgtttctccctactcacaagagggagaactctaggaagcccaacttagaaaaacatgaagaaatgtatcaaggattgaggacgcctcaacttaccccaggcaggaagacagaagacacccgtcagaatgaaggcatccagctactgccatcaaagaaacagcctccttcaataagccactttggagaaaacatcaagcaactttttcagtttttttcaaagaaaaaaaggaagccagcaccagtcactgccgagagccataaaacagtaaaaaacagatcatgcgtgtactgcagcagtgctgaagtgcaggagctcatgacatcagttggacagatgctggaggagaaaatgtcactttgccgtgagtgccatgcctcgaaggtaaatcagcaaagacagcagtttcaagccccagtctgtgggtttccctgcaaccacaggcaccccttctactcagaacacagcagaatgctgaactatgcagccagcagtcaacaagccactcccaagagccagagttgtcccaacagagacaggcaaagcagagatcag

SEQ ID NO: 48243 - DNA, 1077 bp, Homo Sapiens
atggaggcgcccgggctggcccaggcggccgcggcggagagcgactcccgcaaggtggcggaggagacccccgacggggcgcccgcgctctgccccagccctgaggcgctgtcgccggagccgcctgtgtacagcctgcaggactttgacacgctggccaccgtgggcactgggacgttcgggcgggtgcacctggtgaaggagaagacagccaagcatttcttcgccctcaaggtgatgagcattcccgacgtcatccgcctaaagcaggagcaacacgtacacaatgagaagtctgtcctgaaggaagtcagccacccgttcctcatcaggctgttctggacgtggcatgacgagcgcttcctctacatgctcatggagtacgtgccgggcggcgagctcttcagctacctgcgcaaccgggggcgcttctccagcaccacggggctcttctactctgcagagatcatctgtgccatcgagtacctgcactccaaagagatcgtctacagggacttgaagccagagaacatcctgctggatagggatggccacattaagctcacggactttgggttcgccaagaagctggtagacaggacttggaccctctgtggaacacccgagtacctagcccccgaagtcattcagagcaagggccacggaagggccgtggactggtgggccctcggcatcctgatattcgagatgctttcggggtttcctccgttttttgatgacaacccgtttggcatttatcagaaaattcttgcaggcaaaatagatttccccagacatttggatttccatgtaaaagacctcattaagaaactgctcgtggttgacagaacaaggcgattaggaaacatgaagaacggggcgaatgatgtgaagcatcatcggtggttccgctccgtggactgggaagctgttccgcagagaaaactgaagcctcccatcgtgcccaagatagctggtgacggcgacacttccaacttcgaaacttaccctgagaatgactgggacacagccgcgcccgtgccgcagaaggatttagaaatcttcaagaatttctga

SEQ ID NO: 48244 - DNA, 1737 bp, Homo Sapiens
gcttgggggcggaaaagccgtggcgcccccttgcgtggcgcgtcggtctcagagtcgcgtgacttcaaccccctcttcgggaggctgggtcgtcatgatccggaccccattgtcggcctctgcccatcgcctgctcctcccaggctcccgcggccgacccccgcgcaacatgcagcccacgggccgcgagggttcccgcgcgctcagccggcggtatctgcggcgtctgctgctcctgctactgctgctgctgctgcggcagcccgtaacccgcgcggagaccacgccgggcgcccccagagccctctccacgctgggctcccccagcctcttcaccacgccgggtgtccccagcgccctcactaccccaggcctcactacgccaggcacccccaaaaccctggaccttcggggtcgcgcgcaggccctgatgcggagtttcccactcgtggacggccacaatgacctgccccaggtcctgagacagcgttacaagaatgtgcttcaggatgttaacctgcgaaatttcagccatggtcagaccagcctggacaggcttagagacggcctcgtgggtgcccagttctggtcagcctccgtctcatgccagtcccaggaccagactgccgtgcgcctcgccctggagcagattgacctcattcaccgcatgtgtgcctcctactctgaactcgagcttgtgacctcagctgaaggtctgaacagctctcaaaagctggcctgcctcattggcgtggagggtggtcactcactggacagcagcctctctgtgctgcgcagtttctatgtgctgggggtgcgctacctgacacttaccttcacctgcagtacaccatgggcagagagttccaccaagttcagacaccacatgtacaccaacgtcagcggattgacaagctttggtgagaaagtagtagaggagttgaaccgcctgggcatgatgatagatttgtcctatgcatcggacaccttgataagaagggtcctggaagtgtctcaggctcctgtgatcttctcccactcagctgccagagctgtgtgtgacaatttgttgaatgttcccgatgatatcctgcagcttctgaagaagaacggtggcatcgtgatggtgacactgtccatgggggtgctgcagtgcaacctgcttgctaacgtgtccactgtggcagatcactttgaccacatcagggcagtcattggatctgagttcatcgggattggtggaaattatgacgggactggccggttccctcaggggctggaggatgtgtccacatacccagtcctgatagaggagttgctgagtcgtagctggagcgaggaagagcttcaaggtgtccttcgtggaaacctgctgcgggtcttcagacaagtggaaaaggtgagagaggagagcagggcgcagagccccgtggaggctgagtttccatatgggcaactgagcacatcctgccactcccacctcgtgcctcagaatggacaccaggctactcatctggaggtgaccaagcagccaaccaatcgggtcccctggaggtcctcaaatgcctccccataccttgttccaggccttgtggctgctgccaccatcccaaccttcacccagtggctctgctgacacagtcggtccccgcagaggtcactgtggcaaagcctcacaaagccccctctcctagttcattcacaagcatatgctgagaataaacatgttacacatgg

SEQ ID NO: 48245 - DNA, 1491 bp, Homo Sapiens
gagcatcctggcgtgaccccactgaggacttcacctcctctcccttggtggacacctatccaggtgggcatcgtgctgcactattctacactgtccaccatgctgtggataggagtgaccgccaggaacatctacaagcaggtgaccaagaaggcccctctgtgcctggacacagaccagccaccgtaccccaggcagcccctgctcaggttttacctcgtcagcggaggggtcccctttatcatctgtggggtcacggctgccacgaacatcaggaattacgggacagaggacgaggacacggcgtactgctggatggcctgggagcccagcctgggcgccttctacggcccagccgccatcatcaccctggtcacctgtgtgtacttcctgggcacctacgtgcagctgcggcgccacccagggcgcaggtacgagctgcgcacacagcccgaggagcagcggcggctggcgacacccgagggcggccgtgggatccggccaggcaccccacccgcacacgatgcccccggcgcctccgtgctgcagaacgagcactcattccaggcacagctgcgcgccgccgccttcacgctgttcctgttcacggccacgtgggccttcggggcgctggcggtgtcacagggccacttcctggacatggtcttcagctgcctgtacggcgccttctgcgtgaccctgggactcttcgtgctcatccaccactgcgccaagcgtgaggacgtgtggcagtgctggtgggcatgctgcccgccccgcaaggacgcccaccccgcacttgacgccaacggggccgcgctgggccgcgccgcctgcctgcactcgccgggactgggccagccacggggcttcgcgcacccaccgggcccctgcaagatgaccaacctgcaggccgcgcagggccacgccagttgcctgtcaccggccaccccgtgctgcgccaagatgcactgcgagccactgacggcggacgaggcgcacgtgcacctgcaggaggagggcgccttcgggcacgacccccacctgcacgggtgccttcagggcagaactaagccgccctactttagccggcacccagcagaggagcccgagtacgcctaccacatcccatccagcctggatggcagcccccgcagctcgcgcacagacagcccccccagctctctggatggcccggcggggacacacacgctggcctgctgcacccagggcgaccccttccccatggtcacccagcccgagggcagtgatgggagccctgccctctacagctgccccacgcagccgggcagggaggcagcgctcgggcccggccacttggagatgctgcggaggacacagtccctgccctttggtggccccagccagaacgggctgcccaagggtaaattgctagaaggcctgccgtttggcaccgacgggaccggcaacatccgaacgggaccctggaaaaacgaaactactgtgtag

SEQ ID NO: 48246 - DNA, 1095 bp, Homo Sapiens
atggcccagcagtggagcctccaaaggctcgcaggccgccatccgcaggacagctatgaggacagcacccagtccagcatcttcacctacaccaacagcaactccaccagaggccccttcgaaggcccgaattaccacatcgctcccagatgggtgtaccacctcaccagtgtctggatgatctttgtggtcactgcatccgtcttcacaaatgggcttgtgctggcggccaccatgaagttcaagaagctgcgccacccgctgaactggatcctggtgaacctggcggtcgctgacctagcagagaccgtcatcgccagcactatcagcattgtgaaccaggtctctggctacttcgtgctgggccaccctatgtgtgtcctggagggctacaccgtctccctgtgtgggatcacaggtctctggtctctggccatcatttcctgggagaggtggctggtggtgtgcaagccctttggcaatgtgagatttgatgccaagctggccatcgtgggcattgccttctcctggatctggtctgctgtgtggacagccccgcccatctttggttggagcaggtactggccccacggcctgaagacttcatgcggcccagacgtgttcagcggcagctcgtaccccggggtgcagtcttacatgattgtcctcatggtcacctgctgcatcatcccactcgctatcatcatgctctgctacctccaagtgtggctggccatccgagcggtggcaaagcagcagaaagagtctgaatccacccagaaggcagagaaggaagtgacgcgcatggtggtggtgatgatctttgcgtactgcgtctgctggggaccctacaccttcttcgcatgctttgctgctgccaaccctggttacgccttccaccctttgatggctgccctgccggcctactttgccaaaagtgccactatctacaaccccgttatctatgtctttatgaaccggcagtttcgaaactgcatcttgcagcttttcgggaagaaggttgacgatggctctgaactctccagcgcctccaaaacggaggtctcatctgtgtcctcggtatcgcctgcatga

SEQ ID NO: 48247 - DNA, 945 bp, Homo Sapiens
atggagaataatacagaggtgagtgaattcatcctgcttggtctaaccaatgccccagaactacaggttcccctctttatcatgtttaccctcatctacctcatcactctgactgggaacctggggatgatcatattaatcctgctggactctcatctccacactcccatgtacttttttctcagtaacctgtctcttgcaggcattggttactcctcagctgtcactccaaaggttttaactgggttgcttatagaagacaaagccatctcctacagtgcctgtgctgctcagatgttcttttgtgcagtctttgccactgtggaaaattacctcttgtcctcaatggcctatgaccgctacgcagcagtgtgtaaccccctacattataccaccaccatgacaacacgtgtgtgtgcttgtctggctataggctgttatgtcattggttttctgaatgcttctatccaaattggagatacatttcgcctctctttctgcatgtccaatgtgattcatcactttttctgtgacaaaccagcagtcattactctgacctgctctgagaaacacattagtgagttgattcttgttcttatatcaagttttaatgtcttttttgcacttcttgttaccttgatttcctatctgttcatattgatcaccattcttaagaggcacacaggtaagggataccagaagcctttatctacctgtggttctcacctcattgccattttcttattttatataactgtcatcatcatgtacatacgaccaagttccagtcattccatggacacagacaaaattgcatctgtgttctacactatgatcatccccatgctcagtcctatagtctataccctgaggaacaaagacgtgaagaatgcattcatgaaggttgttgagaaggcaaaatattctctagattcagtcttttaa

SEQ ID NO: 48248 - DNA, 193 bp, Homo Sapiens
cggaagaagaagggcccggggcccctggccacggcgtacctggtcatctacaatgtggtgatgacagccgggtggctggttatagcggttggtctggtccgagcatacctggctaagggtagctaccatagcctttattattcaattgaaaagcctttgaaattctttcaaactggagccttattggaggtag

SEQ ID NO: 48249 - DNA, 549 bp, Homo Sapiens
cacttccacaaggactggcagctcgtggccacatggttcaaccagccggcccgaagacgcagatgcaaggccgggcaagctaaagtgccccacattgccctgcacaccgcgttgggacccatccggcccatcgtgtggtgccgcacagtgcgaaatcacaccaaggtgcgcaccggccgcagctgcagcttggaggagctcagggtggctggcattcacaagaaggtggcccagaccattagcatctctgtggatccaaggaggcagtacgagtccaccgagtccctgcaggccaaggtgcggcggctgaaggagcaccactccaacctcaccctctaccccaggaagccctcggccaccaggaagggagacagttctgctgaagaactgaaactggccacccagctgacaggaccggtcatgcccatcccaaacgtctgtaagaaggagaaagcccaagtcatcaccgaggagaagaatttcaaagccttcgctagtctccacatggtccatgctgacgcccggctctttggcataccggcaaagaga

SEQ ID NO: 48250 - DNA, 684 bp, Homo Sapiens
agaattgtccaaggaagggaaacagctatggaaggggaatggccatggcaggccagcctccagctcatagggtcaggccatcagtgtggagccagcctcatcagtaacacatggctgctcacagcagctcactgcttttggaaaaataaagacccaactcaatggattgctacttttggtgcaactataacaccacccgcagtgaaacgaaatgtgaggaaaattattcttcatgagaattaccatagagaaacaaatgaaaatgacattgctttggttcagctctctactggagttgagttttcaaatatagtccagagagtttgcctcccagactcatctataaagttgccacctaaaacaagtgtgttcgtcacaggatttggatccattgtagatgatggacctatacaaaatacacttcggcaagccagagtggaaaccataagcactgatgtgtgtaacagaaaggatgtgtatgatggcctgataactccaggaatgttatgtgctggattcatggaaggaaaaatagatgcatgtaagggagattctggtggacctctggtttatgataatcatgacatctggtacattgtaggtatagtaagttggggacaatcatgtgcacttcccaaaaaacctggagtctacaccagagtaactaagtatcgagattggatt

SEQ ID NO: 48251 - DNA, 735 bp, Homo Sapiens
gaaagagcagaagaggaggtggggtggagggagcagagccagggattaggggactactgaggctctggagatgagaccgccaggagtccttccccaccatgagccccctccactcctgcagctggaggagtttttcccagtctcagtgctgccctggggcgagagagactgaacaagctgtttgggtgggaagagaatggaggaagttgacagggatgggcggggcccgtgggggggctgaccaggaacccagcttcctgctcagtacccaggcatccagcccccagctcacccccaccccttccagcccccactcccctcaggaacccaaggttccagccctcctcccaaatcccagccacccctcccccaccagtttctcccctctaggggatggaggctgagagaccccaggaagaagaggatggtgagcagactgaactccttctggacctggtggctgaagcccagtcccgccgcctggaggagcagagggccaccttctacaccccccaaaacccctcaagcctagcccctgccccactccgtcctctcgaggacagagaacagctttacagcactatcctcagtcaccagtgccagcggatggaagcccagcggtcagagcctcccctccctccaggggggcaagagctcctggagttgctgctgagagttcagggtgggggtcgaatggaggagcaaaggtcccggccccccacacacacctgctga

SEQ ID NO: 48252 - DNA, 348 bp, Homo Sapiens
atggcctccatctccgagctcgcctgcatctactcagccctcattctgcacgacaatgaggtgactgtcacagagtataagatcaaggccctcattaaagcagctggtgtaaatgttgaaccttttcggcctggcttgtttgcaaaggccccggccaatgtcaacattaggagcctcatctgcaatgtaggggctggaggacctgctccagcagctggcgtacgcccatttctgccttggttgcccacctccactgctgctgctccagctgaggagaagaaaatggaagcaaagaaagaagaatttgaggactctgatgatgacatgggctttggtctttctgactaa

SEQ ID NO: 48253 - DNA, 1093 bp, Homo Sapiens
ggttgctatgagacccgctcgagcggaggaccagcagccagcccgacgctgatggttcttacctcgtactaaaacctttgctttgacacagttttagagttgcttaatattcgagcaagcacctgacacgggtgactttctccttctttttttcctccggtccctcgggtaagatggaggtagaaaatgaagccagctgctccccgggcagcgcatcaggcgggtccagagagtacaaggtggtaatgctgggagcagggggagttggtaaaagcgcaatgacaatgcagtttattagtcatcagttccctgattatcatgaccctactatagaagatgcttataagacccaggtcaggattgacaatgagccagcttacttggacatcttggacactgctggccaggtagaattcacagccatgcgggagcagtacatgcgaggtggggaaggcttcatcatctgctactccgtcactgaccgtcaatcatttcaggaggctgccaagtttaaagagctcatttttcaggtccgccacacctatgaaattcccctggtgctggtgggtaacaaaattgatctggaacagttccgccaggtttctacagaagaaggcttgagtcttgcccaagaatataattgtggtttttttgagacctctgcagccctcagattctgtattgatgatgcttttcatggcttagtgagggaaattcgcaagaaggagtccatgccatccttgatggaaaagaaactgaagagaaaagacagcctgtggaagaagctcaaaggttctttgaagaagaagagagaaaatatgacatgatatctttgcttttgagttcctcacgctctctgaattttattagttggacaattccatatgtagcattctgcttcaatattatctctctatgtgtctctctctctttaaatatctgcctgtaggtaaaagcaagctctgcatatctgtacctcttgagatagttttgttttgcctttaacagttggatggattttgtcaatcagctggatatgctgtttagtttttacaacatagtactaaataaaattgacattccaattgcctca

SEQ ID NO: 48254 - DNA, 1045 bp, Homo Sapiens
atgtggaccggatataagatcttaatcttctcttatcttactacagaaatctggatggagaagcagtatttatctcaaagagaagtggacctagaggcttatttcactaggaatcacaccgttttgcaaggtactcgattcaaaagagccattttccaagggcaatactgtagaaattttggctgttgtgaagacagagatgatggctgtgtcactgagttctatgcggcgaatgcgttgtgctactgtgataaattctgtgacagagaaaattctgattgctgtcctgactacaagtccttttgccgtgaagagaaagaatggcctcctcacacacagccttggtatccagaaggcagatggacagcacagaattacagccaattttggggaatgactttagaagatggttttaaatttcgccttggcactttgccacctagtcccatgctcctgagcatgaatgaaatgctggtatcccacgcatgctacccacttttcaaagaccaaaatgctaccaacaatggatgtgccatggcaagcaggtctgatgggcgaggaaaacggcatgccacgaagccatgtcccaacaacgtagaaaaatctaacaggatctatcaatgttctcctccatacagagtctcttccaacgaaactgagataatgaaagaaatcatgcaaaatggaccagttcaagccataatgcaagtccgtgaagatttcttccattataagacagggatatacagacatgttaccagcacaaataaagaatcagaaaaatatcgaaagcttcagacacatgcagtcaaactcactggatggggcacactgagaggagcacaagggcagaaagaaaaattttggattgctgccaattcctggggaaagtcatggggagagaatggctatttcaggattcttcgaggagtaaatgagtccgacattgaaaagttgattatcgcagcttggggccaactgacgagttctgatgaaccataacatatcattaaatttccataaggtcatgcctttaagtaacccc

SEQ ID NO: 48255 - DNA, 1211 bp, Homo Sapiens
aaagttcgaagtgggatgatcacgggcagacctgggtggttgggaacaggaagcatatggcatcttgcaggctataggcaccacaaaatggaacgcaggaggacaggggcttgggagagccacttcactgtcgggtaaaacaacggagcaagatgagtgcctccggatgcttggtttccccaccctccagtgtctgcttgctcttcaagtacctccaccaagctaatgacagtccactttaggacatcacgggcctcgaggttacaactttcccaggctttgttatttggttctctactgcacagaaatagatagaattctgacagccatcattgttaaacatcaggattttctaagaggacagacttaacagtaacatcatggcctcagcaggactccagctccttgctttcatcctggccttatctggggtctctggagtgctcacagccactctgctgcccaactggaaggtgaatgtggatgtggactccaacatcataacagccattgtacagctgcacgggctctggatggactgtacgtggtacagcactgggatgttcagctgtgccctgaaacactccattctgtccctccccatccacgtgcaggctgcgagagccaccatggtcctggcgtgtgttctgtctgctttggggatctgcacttccacagtaggaatgaaatgtactcgcttaggaggggacagagaaaccaagagccatgcttcctttgctggaggagtctgtttcatgtctgcaggaatctctagtttaatctcgacagtgtggtacacaaaggagatcatagcaaactttctggatctgacagttccagaaagcaacaaacatgaacctggaggagctatctatatcggattcatttctgcaatgctgttgtttatctctggcatgattttctgcacctcctgtataaaaaggaatccagaagctagactcgacccacccacacagcagcctatctctaacacacagctcgagaacaattccacacacaatctgaaggattatgtgtaaataactgagtaatgcatatgaaatggaacttttgggtgccaaatgggacttttagattaaaaaaaaatcagaattatgcttaactttccctacaaagaaagtagaatgtaaaatactttaacaactacaaagtagtttaaaatgccaataaaactatcatatacaattaca

SEQ ID NO: 48256 - DNA, 351 bp, Homo Sapiens
atggtgtggccagcctcacccccagcagcaagcgtggctgcccccacaaggatgacccaccgctctgcacagcagtgcccacatccaaacaccctacacaaccaggtgtggtgcctgcacagctcccaagctggggcctgcccacctgtgccgcatgcacacgcacacacaggcgcccccacctcaccccaccccatactcctgtctacctacctaaggagaaagctggagggctgtgggcccgtcagggtctcctgcttccccctacaccccgccgccgtggaaagccatgggccccctcccgcccccataactaagcagcacaataaccgacttagcgaattcaggtag

SEQ ID NO: 48257 - DNA, 1389 bp, Homo Sapiens
gaggggaaggggccagcgccatccgctcgcccggaatccggtccccgcggcggctgcgcgtcccggccgcggcccctccggcccgggagtgagcagcagcaggaggagaggcagcggcccggggttggccggggctggggaggagggacgggacggagggagggcgcgggggcggggagggggccccggcggataaagatggcaatgtctctcatccaagcgtgctgcagtctggctctctcaacatggctgctttccttttgtttcgtgcatctgctctgcctggactttaccgtggccgagaaggaggaatggtacaccgccttcgtgaacatcacctacgccgagcccgcgccggaccccggggccggggcggcgggcggcggcggcgcggagctgcacacggagaagacggagtgcgggcgctacggagagcactcgcccaagcaggacgcccgcggggaggtggtcatggccagctcggcccacgaccgcctggcctgcgaccccaacaccaagttcgccgccccgacccgcggcaagaactggatagccctcatccccaagggcaactgcacgtacagggataagatccggaacgcgttcctgcagaacgcctcagccgtggtcatcttcaacgtgggctccaacaccaacgagaccatcaccatgccccacgcgggtgtagaagacatcgtggccataatgattcctgagccaaaagggaaggagatagtaagcctgctggaaagaaacatcaccgtgacaatgtacatcaccatcggaacccggaacttgcagaaatatcgccgactgggggatgcagcaaagaaagccatcagcaaactccagatcaggaccatcaagaagggtgacaaggaaacagagtctgattttgacaactgtgcagtttgtattgaagggtacaagcccaatgacgttgtccggatcctgccctgccggcatcttttccacaagtcctgtgttgacccctggcttctagaccatcgtacctgtcccatgtgcaagatgaacattcttaaagccctagggatcccgcccaatgccgactgcatggacgacttgcccactgacttcgagggctctctgggaggtccacccaccaaccagatcacaggtgccagcgacacaacagtgaatgaaagttcagtcactttggaccctgctgtccggactgtgggagccttgcaggtggtccaggatacagaccccatcccccaggagggagacgtcatctttactactaacagtgagcaggagccagctgtaagcagtgattctgacatttccttgatcatggcaatggaggttggactgtctgatgtagaactttccactgaccaggactgtgaagaagtgaaatcttga

SEQ ID NO: 48258 - DNA, 1714 bp, Homo Sapiens
ctcccggcctcgcctcgcagacgcgacgggccggggaggaagcgctcggagcagtgcaggtttcgttatcctgtgttaggtcactccggagaggggaaagcggcccacagcgtcgcgcgacccggaaacgacacaacgaggcccaatcttttagactcgagtttaggccccggggtggagtctccggaccgggtccccccacccccgctacaggggcagtgcgcaggcgcgagggacgcacaaccccagcccctgtcccagtgagcccgtcgccatggaatccctgcagactccccagcaccgcgaaaatcaagataaaagggagaaggagtatggggtaaaacacatgcctatgggcaataatgcagggaatcttgagcccgaaaagagaaaggcagtaagagttgccttgagttcagcaacagctgcacagaatatcccgtccagtgtccactgtggctgctccaagcaatggagactcaggctaccatcggagtcgctgcaaagtcggggacaagtgatgaagcggccgaataacattttaaagctcaggaatctggatctgttgatctacccttggccagaacttagaagacggcaggttgcttctgacctaatgagcctcctccttctccccgctttttccggccttacttgggcccccttccttttcctctttacgtatctgcctccttttctcaatctcctcactgttggttttgtatcctattttctggtatagtttctgtgatttctttcttttatttattattattattgttgttgagacagagttttgcccttgttgcccaggctggagtgcaatggcgcgaacctggctcactccagccagcgcctcacaggttcaggtgattctcctgcctcagcctccggagtagctggggttacaggcacgggccaccagcccagctaatttttgtatttttagtacagacggtgtttcaccatgttagtcaggctggtctcgaactcctgacctcaggtgatccgcccacctcggccttccaaagtgctgggattacaggcatgagctactgtgcccagcctctatgatttcaattttcatgtttaagtacctatgtagaacctaactgtccataagtaaacacaacaaaaaaaagatttggcttttggtcaaagatcattggaggttacacagggtaaagtgcagtatgatttttatcacaattagaaagattaaaaagagatgacagtgagtttgtgagaacaggtttgtgtttcataaaatgaattgtgtgagttagctatgatgaactgcaagcagcttgcatttccaaagacaaatagagacacaggaatctaattaaaatgctaaagtaatgggaaggagacatccatacgtttttgtccccctaaggttccagatttatagtttgagcatcatctcggcttacattttctctgtggaaaacatcagccattacattacttggctctgggttgaaatcctaacttcatcaactgaagatcttatgacctaggcaagtttattaacctcctctatgacgtgataaaaatagtatctcttgtgcggattagaagacatgttcctctatgctaagatgattattatgtgcggaacacatagttaagtgcttgataaattgaactatggcaaatccagtctcaaccgtggcaaaactaagttaataaaaatgaaacataaccttta

SEQ ID NO: 48259 - DNA, 3093 bp, Homo Sapiens
ggcgcggggcgccatggcacaccgagcggctccgtcttctgctcctcagagagcccggctggcggcctgggatgacaagatgtctggactgcaatcctgcacagttttgagagggagatgacttgagtggttggcttttatctccacaacaatgtccatgaacaattccaaacagctagtgtctcctgcagctgcgcttctttcaaacacaacctgccagacggaaaaccggctttccgtatttttttcagtaatcttcatgacagtgggaatcttgtcaaacagccttgccatcgccattctcatgaaggcatatcagagatttagacagaagtccaaggcatcgtttctgcttttggccagtggcctggtaatcactgatttctttggccatctcatcaatggagccatagcagtatttgtatatgcttctgataaagaatggatccgctttgaccaatcaaatgtcctttgcagtatttttggtatctgcatggtgttttctggtctgtgcccacttcttctaggcagtgtgatggccattgagcggtgtattggagtcacaaaaccaatatttcattctacgaaaattacatccaaacatgtgaaaatgatgttaagtggtgtgtgcttgtttgctgttttcatagctttgctgcccatccttggacatcgagactataaaattcaggcgtcgaggacctggtgtttctacaacacagaagacatcaaagactgggaagatagattttatcttctacttttttcttttctggggctcttagcccttggtgtttcattgttgtgcaatgcaatcacaggaattacacttttaagagttaaatttaaaagtcagcagcacagacaaggcagatctcatcatttggaaatggtaatccagctcctggcgataatgtgtgtctcctgtatttgttggagcccatttctggttacaatggccaacattggaataaatggaaatcattctctggaaacctgtgaaacaacactttttgctctccgaatggcaacatggaatcaaatcttagatccttgggtatatattcttctacgaaaggctgtccttaagaatctctataagcttgccagtcaatgctgtggagtgcatgtcatcagcttacatatttgggagcttagttccattaaaaattccttaaaggttgctgctatttctgagtcaccagttgcagagaaatcagcaagcacctagcttaataggacagtaaatctgtgtggggctagaacaaaattaagacatgtttggcaatatttcagttagttaaatacctgtagcctaactggaaaattcaggcttcatcatgtagtttgaagatactattgtcagattcaggttttgaaatttgtcaaataaacaggataactgtacatttttcacttgtttttgccaatgggaggtagacacaataaaataatgccatgggagtcacactgaaagcaattttgagcttatctgtcttatttatgctttgagtgaatcatctgttgaggtctaatgcctttacttggcctatttgccagagaacatcttaatgcagcctgcatagtgaaatggttattttgagatcaccgctctgtagctaacccttataaactaggctcagtaaaataaagcactcttattttttgatctggcctattttgcccctcattgtgtagcctcaattaacacatgcatggtcatgacacccagaattcatgatggtttgttataacaacctctgcatattccaggtctggcagacaggttgcctgaccctgcaatcctatctagaatgggcccattcttgtcatatttgacaaataggactgcctacatttattattatgaaggtcgattgttgttggaagtgttttttcatgtcatagattagcaattttcaaataattattttttctctgaaaattttgtgtgtgattgcacaataaataatttttagagaaacaaaggctctttctcagcacattgatgggcaactagaattacagcagtttcaaaactctaccatggataatgcaaacaaaccgaagctacatgccaatgataggtgcaaagaatattggcaaaaggtgctttaccttgagccattatttgtgtcagagaacaaaagaaacagaatcaatatataaaattcaaagactatctgcagctagtgtgtttcttctttacacacatatacacacagacatcagaaaattctgttgagagcaggttcattaaatttgtaagatggcatattctaaagcctgtgctaccagtactaagaggggaagactggcaatttgccaagcacttggggattattataacaattaactaggagatcaagagataataatctctccccaaattttccaataataattgagactttttctttgcttgtttgtgtaattcaaccaaaagaatttcaatacccattcaaattgtcctaggtctatcagaaattagggaaggtagtcctgctttataataggaaaatgtatttctgtataagagttctttgctttcattaacttggattcatttaaaaattaatcttccctgttaggctgatttcagattctctaggaaatctgtgtaagtaaccagaagacctttcagatggtttatttgctttcagcagagaatttatttcatacagttacttaagagtgttgatgtcttgtgaacagagatataaggaaccattctccatccttccttatcatgctgggtacaatgcttctatgaatatttccatgtattttgactggggagaggcatggagaagaaactctcattcaggggctccaggatccttctccttgaggcttctaaataaatggcagaattcttgctgtattgccatgatgtcaccctggccatgtgtactgacttgaggagatcttgcaacatggccatgtgcaaggctttaaggagtgagagagatgtgtacatatcttaggagggttatctatgttatctgagtatatgtttgggtaaccaaattggtcttaaaaatgatgttaacccaagaagtagacatcaaaaattaaaaaaaaaaaaaggaa

SEQ ID NO: 48260 - DNA, 561 bp, Homo Sapiens
atgcctctggaggtggtggtggagctgcagatccgggcgatttcttgcccaggagtgttcctgcctggcaaacaagatgtgtacctcggggtctacctcatgaatcagtacctggagaccaacagctttccctctgcgttccccattatgattcaggagagcatgagatttgaaaaggtatttgaaagtgcagtagatcctggagctgtagtagaccttttggaaatgtgggatgagttggcctactacgaagaaaacacacgagattttcttttcccagagcccaagctgacaccttcgcaccctaggaggtgtagggaggtgctcatgaagacggctctgggttttccaggcattgctcccaaaatagagttttctacaaggacagccatcagagaatgtgtgtttctgcatagaaacagatttcttggctggggaaacaaagggaagatgttggttcagcaagaacacagaagcttaaagaagaaactgaacagaaatgggacccagacctctggagaagggctgctttcctggatgcttcttcaggaattcgaaggt

SEQ ID NO: 48261 - DNA, 2368 bp, Homo Sapiens
gcgagaagccccactgaagccgggcgcagggtctgggacgcagttgggagtgcaaagggctggctgagagccgcaggagcagcaggctgtggcccaggcctcctgggtgacaggccctgtctggcggggaagagggaccaagagacaacacggaagaggctggacctcgaacaggggcggctgcctcactccctacctgagccagccgagggggccaaggactttagagctgtttcctccggcataagagagacacttgctttccagggcagcaccctttatcggagaaggctctacagggaaggggtctttgcagcctggatggccatcccacattcctttaacggaggtctctaggcctcagagagaacccagagttagaaaggaggccagacggtccttgctgtccccctggggagagaggaagttgccgcctgctgccaggcccaggaggagctgggcctgcaatagtgggggacctggcccctgaggcagtggcggccatgtcacggccaggccacggtgggctgatgcctgtgaatggtctgggcttcccaccgcagaacgtggcccgggtggtggtgtgggagtggctgaatgagcacagccgctggcggccctacacggccaccgtgtgccaccacattgagaacgtgctgaaggaggacgctcgcggttccgtggtcctggggcaggtggacgcccagcttgtgccctacatcatcgacctgcagtccatgcaccagtttcgccaggacacaggcaccatgcggcccgtgcggcgcaacttctacgacccgtcgtcggcgccgggcaagggcatcgtgtgggagtgggagaacgacggcggcgcatggacggcctacgatatggacatctgcatcaccatccagaacgcctacgagaagcagcacccgtggctcgacctctcatcgctaggcttctgctacctcatctacttcaacagcatgtcgcagatgaaccgccagacgcgccggcgccgccgcctgcgccgccgcctggacctcgcctacccgctcaccgtgggctccatccctaagtcgcagtcgtggcccgtgggcgccagctcgggccagccctgctcctgccagcagtgcctgctggtcaacagcacgcgcgccgcctccaacgccatcctggcctcgcagcgccgcaaggcgccccccgcgcccccgctgccgccgccgccgccacctggagggcctccaggcgcgcttgccgtgcgccccagcgccaccttcacaggcgccgcgctctgggcagcgcccgccgccggccccgccgagcccgcgccgcctcccggggcgcccccacggagcccgggcgcccccggcggagcgcgcaccccggggcagaacaacctcaaccggcccgggccccagcgcaccaccagcgtgagcgcgcgcgcctccatcccgccgggggtccccgcactcccggtgaagaacttgaatggtactgggccggtccatccggccctggcagggatgaccgggatactgctgtgcgcggccgggctgcccgtgtgcctgacgcgggcccccaagcccatcctgcacccgccgcccgtgagcaagagcgacgtgaagcccgtgcctggcgtgcccggggtgtgccgcaagaccaagaagaagcaccttaaaaagagtaagaatcccgaggatgtggttcgaagatacatgcagaaggtgaaaaacccacctgatgaggactgcaccatctgcatggagcgactggtcacagcatcaggctacgagggcgtgcttcggcacaagggcgtgcggcctgagctcgtgggccgcctgggccgctgtggccacatgtaccacctgctgtgcctcgtggccatgtactccaatggcaacaaggatggcagcctgcagtgccccacctgcaaggccatctacggggagaagacgggtacgcagccgcctgggaagatggagttccacctcatcccccactcgctgcccggcttccctgatacccagaccatccgcatcgtctatgacatccccacaggcatccagggccctgagcaccccaaccccgggaagaagttcaccgcaagaggattccctcgccactgctatctacccaacaacgagaaaggccggaaggtgctgcggctgctcatcacggcctgggagagaagactcatcttcactatcggcacgtccaacaccacgggcgagtcggacaccgtggtgtggaacgagatccaccacaagaccgagtttggatccaacctcacgggccacggctacccggacgctagctacctagacaacgtgctggctgagctcacagcccagggcgtatccgaggctgcagccaaggcttgagg

SEQ ID NO: 48262 - DNA, 267 bp, Homo Sapiens
atggcaagctgcacaaatcgcggaggcctcccagagaaacacagctcctccaaggtgtcaagccacgcccaaatgatccaaaaagcagttgattttttagaccttttaatcggccacctgagcaaattctcaccagttttgatagttttccagtttagtcccttgggttttctagttagacagtcatctgcagataatgttcaatttttgtcctttgccccctccctcattctaccaagtggcacaggaaattggttggtttggtga

SEQ ID NO: 48263 - DNA, 303 bp, Homo Sapiens
atggcttatggaatacagacctgggatgcttcaggaaaacccaacaactatggcatcaaacccgtttccgtcgttgggcgaatacagctggctgccgggcaaacctccggcagctggtcttttacggtgccctcaggaatgaaagttggttttgttctttcacttgatgaaggaggtaacagcgtagggcggcgcattgtcgcgtcagggagcacaataaccgtaagcgctgcatcttctgtaggtctgggtaattatccggcctcaaagtgtgaagtggtcgttttcatggagaaagcataa

SEQ ID NO: 48264 - DNA, 1032 bp, Homo Sapiens
cgcccccagagtctggctttccgcggctgcccgcctcgcgcgtcttccctgcccgggtctcctcgctgtcgccgccgctgccacaccatggccttcgtcaccaggcagttcatgcgttccgtgtcctcctcgtccaccgcctcggcctcggccaagaagataatcgtcaagcacgtgacggtcatcggcggcgggctgatgggcgccggcattgcccaggttgctgcagcaactggtcacacagtagtgttggtagaccagacagaggacatcctggcaaaatccaaaaagggaattgaggaaagccttaggaaagtggcaaagaagaagtttgcagaaaaccttaaggccggcgatgaatttgtggagaagaccctgagcaccatagcgaccagcacggatgcagcctccgttgtccacagcacagacttggtggtggaagccatcgtggagaatctgaaggtgaaaaacgagctcttcaaaaggctggacaagtttgctgctgaacatacaatctttgccagcaacacttcctccttgcagattacaagcatagctaatgccaccaccagacaagaccgattcgctggcctccatttcttcaacccagtgcctgtcatgaaacttgtggaggtcattaaaacaccaatgaccagccagaagacatttgaatctttggtagactttagcaaagccctaggaaagcatcctgtttcttgcaaggacactcctgggtttattgtgaaccgcctcctggttccatacctcatggaagcaatcaggctgtatgaacgaggtgacgcatccaaagaagacattgacactgctatgaaattaggagccggttaccccatgggcccatttgagcttctagattatgtcggactggatactacgaagttcatcgtggatgggtggcatgaaatggatgcagagaacccattacatcagcccagcccatccttaaataagctggtagcagagaacaagttcggcaagaagactggagaaggattttacaaatacaagtga

SEQ ID NO: 48265 - DNA, 303 bp, Homo Sapiens
atggcagatgaggaagaagaccccacgtttgaggaagaaaatgaagaaattggaggaggtgcagaaggtggacagggtaaaagaaagagacttttttctaaagaatttaaatgtaatatgtttctttgtaatactcacaaggcaatgtcaattggaagacaaggtcgagtacaagttgaagatatcgtcttcttgattcgaaaggacccaaggaagtttgccagggttaaagacttgcttactatgaatgaagaattgaaacgagctagaaaagcatttgatgaagcaaattatggatcttga

SEQ ID NO: 48266 - DNA, 924 bp, Homo Sapiens
atggggtttcaccatgttggtcagattgaagttggaaactttctcctcctgggattcgcagaggactctgacatgcagcttctcctccatgggctgttcctctccatgtacctggttaccatcatcggaaacctgctcatcatcctgaccatcagttcagactcccacctccacacccccatgtacttcttcctctccaacctgtcctttgctgacatctgtttcacatccacgactgtcccaaagatgctggtgaatatccaaacacaaagcaaaatgatcacttttgcaggctgcctcactcagatattttttttcattgcatttggatgcctggacaatttgctcctgaccatgacggcctatgaccgcttcgtggccatctgttaccccctgcactacacggtcatcatgaacccccggctctgtggactgctggttctggggtcctggtgcatcagtgtcatgggttccttgcttgagaccttgaccattttgaggctgtccttctgcacaaatatggaaattccgcactttttttgtgatccttccgaagtcctgaagctggcctgttctgacaccttcatcaataacatcgtgatgtattttgtgaccattgtcctgggtgtttttcctctctgtggaatcctattctcttattctcagattttctcctccgtcctaagagtatctgccagaggccagcacaaagccttttccacctgtggttcccacctctcagtggtcagcttgttctatggcactggccttggggtctatctcagttctgcagttacaccaccttctaggacaagtctggcagcctcggtgatgtacaccatggtcacccccatgctgaaccccttcatctacagcctgaggaacaaggacatgaaggggtcactggggagactcctcctcagg

SEQ ID NO: 48267 - DNA, 1308 bp, Homo Sapiens
atcctgaaagacagccccaggtcacttctggcacagaagtcctcccaccttgaagagacaggctctgactctggcactttgctcagcacgtcttcccaggcctccctggcaaggttttccatgaagaaatcaaccagtccagaaacgaaaagcgagtttttggccaacgtcagcaccatcacctcagattattccaccacatcgtctgctgcatacttgactagcctggactccagtcgactgagccctgaggtgcaatccgcggcagagagcaagggggacgaggcagatgacgagagaagcgaactcatcagcaaagggcggcctgtggaaaccgacagcgagagtgagtttcccgtgttccccacagccttgacttcagagaggcttttccgaggaaaactgcaagaagtgactaagagcagccggagaaattctgaaggaagtgaattaagttgcaccgagggaagtttaacatcaagtttagatagccggagacagctcttcagttcccataaactcatcgaatgtgatactctttccaggaaaaaatcagctagattcaagtcagatagtggaagtctaggagatgccaagaatgagaaagaagcaccttcattaactaaagtgtttgatgttatgaaaaaaggaaagtcaactgggagtttactgacacccaccagaggcgaatccgaaaaacaggaacccacatggaaaacgaaaacagcagatcggttaaaactgagacccagagcccctgcggatgacatgtttggagtagggaatcacaaagtgaatgccgagactgctaaaaggaaaagcatccggcgcagacatacactaggagggcacagagatgctactgaaatcagcgttttgaatttttggaaagtgcatgagcagagcggggagagagaatctgaactttcagctgtaaatcgattaaaaccaaaatgctcagcccaggacctttccatctcagactggctggccagggaacgcctacgcaccagtacctctgaccttagcagaggagaaatcggagatccccagacagagaagccaagcacacgggaaatagccacgaccgacacacctttgtctcttcattgccccacaggcagttcttccagcatcttggcttcaacaaacaggccccttctttccataccaccacagtcacctgaccaaataaatggagaaagcttccagaacgtgagcaaaaatgctagttctgcagcgaatgcccaacctcataaactatctgaaaccccaggcaataaagcagagtttcatccctgtctttaa

SEQ ID NO: 48268 - DNA, 968 bp, Homo Sapiens
gtacaggaagtcaaggtcaggccatacccaccacagttcgggcagccatagaggagagctttcttaacggtccgctgggacccaagtgggcctcccctgggactgcgtgctcccctacagaacctgatggctggaaacactcacactactgcctgtcccggcatctctccctccgccgcaggggctgatgctgccacaggacacagagcagcaggccccagaggcttctctgcacctctgctgcctttctgagtaatcagaggaggccacacccactccaggacacccacacgggccttctgggcgatgacgctcctggcccaggagtggggggctgcctcacacctgctgctgtggggcagagtctctcctgggtcggggcctcgctggcggatctgctccatgtcgtgtgatgtgctgcagccccgcgtcaccgagagcctcttatgggccaccaagtccacacagccactggccatggggcaccctgcagggcctctggacacggagacctgtggttctcagccagtggtgattttgtgtccagggaacacctggccaagtctgggttcaattttgtttgtcacagtttaaggttggggtgtcactagacatcctacagtgcacaggacggccccacagcagaccagcccgactgtcagcagcaccgagccgggaaagcctggtctggagccgtttctctctagggtccctgctagggaacccctcactgccatggagaacccctctcctcctgtctctcaggactctccgagggtcaaggatggatgcctccccatcgagggccaaacaaactgacaaatcgagtgggcaaacggcttactcaaaggccaggagcagctacccgatgactgctccctcgacctctctcttctcactttcttccctattccatcctttgatgggtggcctgttacacgtttggaaataaaaacaagtgggaaaga

SEQ ID NO: 48269 - DNA, 909 bp, Homo Sapiens
cccccctgtgaggctctgcccctcagtctagcccctgcccaccttcctggcactgaggaggactccttgtacctggatcactctggccccctgggtccatcaaagccatcgccacccctgcctcagcccaccatggtgagaggcctctccagaagtccctccttccccacccgccccatcccaggctgccatttcccactgaagggagcagtgagcctgccggtggccggaaagcagggacctatctttgggaggcgaggtaatggggatgtcctctctttctgccctccaaagaaacctgatgaggacctctacttggaatgtgagccggatccagtcctggctttgactcagactctcagcttccaagtcctgatgccctcaggccctctgcccaggacatcagtggtgcccagggtgggacctggggcccggcctcttctgatcagacctcctgtatgccagggaacagcagatgctgcctctaaagaaggaaggaaatcgtctcttccctctgtagcccccactgggagtgcctcagctgctgaggacagtgatctgctgactcagccttggtactcggggaactgtgaccgctatgctgttgagagtgccctgctccacttacaaaaggatggggcctataccgtgcgccccagctcagggcctcatggctcccagcccttcaccctggcagtgcttctccgaggccgggtcttcaacattcccatccggcggctggatggcggacgccactatgccctgggccgggagggcaggaaccgtgaggagctcttctcctccgtggcggccatggtccagcacttcatgtggcaccctctgccccttgtggacagacacagcggcagccgggaactcacctgcctgctcttccccaccaagccttga

SEQ ID NO: 48270 - DNA, 2084 bp, Homo Sapiens
atgcacccccaggaaggccacgcgctcaggcccccgccccgctggctgctgctcacatggtgtctgggcccttggcactctgttcatgcgggagatggcaggggctggcacatgacagtggagcagaaatttggcctgttttctgctgagataaaggaagcagaccccctggctgcctcggaagcaagtcaacccaaaccctgtccccccgaagtgaccccccactacatctggatcgacttcctggtgcagcggtttgagatcgccaagtactgcagctctgaccaagtggagatcttctccagcctgctgcagcgctccatgtccctgaacatcggcagggccaaggggagcatgaaccggcacgtggcggccatcgggccccgcttcaagctgctgaccctggggctgtccctcctgcatgccgatgtggttccaaatgcaaccatccgcaatgtgcttcgcgagaagatctactccactgcctttgactacttcagctgtcccccaaagtttcctactcaaggagagaagcggctgcgtgaagacataagcatcatgattaaattttggaccgccatgttctcagataagaagtacctgaccgccagccagcttgttcccccagctgacatcggcgacctcctggagcagttagtagaggagaacacaggctccttgtcgggcccagcgaaggacttttaccagcgggggtttgatttctttaacaagatcaccaacgtgtcggctgtcatcaagccctaccctaaaggcgacgagagaaagaaggcttgtctgtcggccctgtctgaagtgacggtgcagccaggctgctccctgcccagcaaccccgaagccattgtgctggacgtcgactacaagtctgggaccccgatgcagagtgctgcaaaagccccatatctggccaagttcaaggtgaagcgatgtggagttagtgaacttgaaaaagaaggtctgcggtgccgctcagactctgaggatgagtgcagcacgcaggaggccgacggccagaagatctcctggcaggcagccatcttcaaactgggagacgactgccggcaggacatgctggccctgcagatcatcgacctcttcaagaacatcttccagctggtcggcctggacctctttgtttttccctaccgcgtggtggccactgcccctgggtgcggggtgatcgagtgcatccccgactgcacctcccgggaccagctgggccgccagacagacttcggcatgtacgactacttcacacgccagtacggggatgagtccactctggccttccagcaggcccgctacaacttcatccgaagcatggccgcctacagcctcctgctgttcctgctgcagatcaaggacagacacaacggcaacattatgctggacaagaagggccatatcatccacatcgactttggcttcatgtttgaaagctcgccgggcggcaatctcggctgggaacccgacatcaagctgacggatgagatggtgatgatcatggggggcaagatggaggccacacccttcaagtggttcatggagatgtgtgtcggctacctggctgtgcggcacaggtttagccccaacatgactgagcgcgaggctgcaaatttcatcatgaaggtcatccagagctgcttcctcagcaacaggagccggacctacaacatgatccagtactatcagaatgacatcccctactgaggaggggaccttcgagggcctctgccccatgtgcccttgaagctgccccacaatcatggagccctgcgacctacccgccctgccgccacatgcagtggaggagaggcctgtggcccgaagagcctggtagcgcctcctggggcagcacgtgggtggcgcaggcttagtaacgccgtggactgcagcgacaatcagtggatggtgctgtctatgcacaggtgtgagtcctctgtttgcactggacatattccctacctgttttatttcataggtacatgaagtattgtgtataaaaaaagagataagatttaaccaacatcaacaaaataaaaacccaaaatagtgctgtgttggaa

SEQ ID NO: 48271 - DNA, 348 bp, Homo Sapiens
gatctacctctttgctttaaaaaggaagaaaatcctccatccaacaacgtagatggccctggaggatgttatgccaagtgcaagaagaaacgagaaggacaaatgctacatgatctcattcctatgggccctgcaacagccacatccttcttgactgaagacattggccttgccttctatcaggtttcccctctcctggggttcctctgcctgctctctcaagacacatggaacatgtacacgtgcccaagatggatcggccgctcagccgagcctcccagtgctgcctgccaggctggagggacccgtcttctagggacattgcactcccctgctcttctgagctga

SEQ ID NO: 48272 - DNA, 2220 bp, Homo Sapiens
cttgctaaccacaaaacccgccaggccggtgcgggagctgcggagcatccgctgcggtcctcgccgagacccccgcgcggattcgccggtccttcccgcgggcgcgacagagctgtcctcgcacctggatggcagcaggggcgccggggtcctctcgacgccagagagaaatctcatcatctgtgcagccttcttaaagcaaactaagaccagagggaggattatccttgacctttgaagaccaaaactaaactgaaatttaaaatgttcttcgggggagaagggagcttgacttacactttgggaatcagaggcaatgagcccgtatatacttcaactcaagaagactgcattaattcttgctgttcaacaaaaaacatatcaggggacaaagcatgtaacttgatgatcttcgacactcgaaaaacagctagacaacccaactgctacctatttttctgtcccaacgaggaagcctgtccattgaaaccagcaaaaggacttatgagttacaggataattacagattttccatctttgaccagaaatttgccaagccaagagttaccccaggaagattctctcttacatggccaattttcacaagcagtcactcccctagcccatcatcacacagattattcaaagcccaccgatatctcatggagagacacactttctcagaagtttggatcctcagatcacttggagaaactatttaagatggatgaagcaagtgcccagctccttgcttataaggaaaaaggccattctcagagttcacaattttcctctgatcaagaaatagctcatctgctgcctgaaaatgtgagtgcgctcccagctacggtggcagttgcttctccacataccacctcggctactccaaagcccgccacccttctacccaccaatgcttcagtgacaccttctgggacttcccagccacagctggccaccacagctccacctgtaaccactgtcacttctcagcctcccacgaccctcatttctacagtttttacacgggctgcggctacactccaagcaatggctacaacagcagttctgactaccacctttcaggcacctacggactcgaaaggcagcttagaaaccataccgtttacagaaatctccaacctaactttgaacacagggaatgtgtataaccctactgcactttctatgtcaaatgtggagtcttccactatgaataaaactgcttcctgggaaggtagggaggccagtccaggcagttcctcccagggcagtgttccagaaaatcagtacggccttccatttgaaaaatggcttcttatcgggtccctgctctttggtgtcctgttcctggtgataggcctcgtcctcctgggtagaatcctctcggaatcactccgcaggaaacgttactcaagactggattatttgatcaatgggatctatgtggacatctaaggatggaactcggtgtctcttaattcatttagtaaccagaagcccaaatgcaatgagtttctgctgacttgctagtcttagcaggaggttgtattttgaagacaggaaaatgcccccttctgctttccttttttttttttggagacagagtcttgctttgttgcccaggctggagtgcagtagcacgatctcggctctcaccgcaacctccgtctcctgggttcaagcgattctcctgcctcagcctcctaagtatctgggattacaggcatgtgccaccacacctgggtgatttttgtatttttagtagagacggggtttcaccatgttggtcaggctggtctcaaactcctgacctagtgatccaccctcctcggcctcccaaagtgctgggattacaggcatgagccaccacagctggcccccttctgttttatgtttggtttttgagaaggaatgaagtgggaaccaaattaggtaattttgggtaatctgtctctaaaatattagctaaaaacaaagctctatgtaaagtaataaagtataattgccatataaatttcaaaattcaactggcttttatgcaaagaaacaggttaggacatctaggttccaattcattcacattcttggttccagataaaatcaactgtttatatcaatttctaatggatttgcttttctttttatatggattcctttaaaacttattccagatgtagttccttccaattaaatatttgaataaatcttttgttactc

SEQ ID NO: 48273 - DNA, 315 bp, Homo Sapiens
atgctaccttccatgcagactgttccatctgcagatgttggaagccttactggtgcaaggtggctgggcttaatctctgcccaaatccactggctgaccactaaactaagcagccactcactcattagggaaatgcaaattaaagccataacaacaaccaccagaatggctaaaattaaaaagactgacaatccaagtgttgacaaggatatgcggaaaccagaatcctctcaaattgctggtgggaatataaaacagtatggccatgatggaaaacagtttggcagtttcttaaaaagttcaatatacacttaa

SEQ ID NO: 48274 - DNA, 696 bp, Homo Sapiens
gtcttgaagtgcaacattcactgggtttcatatgggagaaaaacactaaaatcaaacacatggacaggcagtcagaacaatgtccatcatatacatagtaaaattaatacaaggacaaacattcatgagtggagtccatttgaatcagcctgtagtgaagacatgtgccttagggcacacataactcatgttagggagaaaatgtataattttactcaatgtgaaaacatcttcagaaataactcagtccatgctgtccagatgcagttctgttctgtagagatgaagaataagaatcatcaaagtggaaaaacctctgtcgctccaaattctggtccacacaggagtagtactactggagagaaaagccatacatgtcccaaaggaaagcctttacgttatcagtcatttcttatgagacatatgaaacttcacactggagagaaaccttatgaatgtaacaaaagtgagaaaggctttagatattccctacaccttaataaatatttaagaaagaacattctggagaagccctatggatgtaaggaatgtgggaaacttcagcaaggctcaaaacatgcacatataaggagtcacactggaaaaccctataaatgtgataaatgtgaaaaagactttgcaaagtcaccaattaaaagccatcttaagattcacaatagtgagaagccctgtgag

SEQ ID NO: 48275 - DNA, 960 bp, Homo Sapiens
atgacacagttgacggccagtgggaatcagacaatggtgactgagttcctcttctctatgttcccgcatgcgcacagaggtggcctcttattctttattcccttgcttctcatctacggatttatcctaactggaaacctaataatgttcattgtcatccaggtgggcatggccctgcacacccctttgtatttctttatcagtgtcctctccttcctggagatctgctataccacaaccaccatccccaagatgctgtcctgcctaatcagtgagcagaagagcatttccgtggctggctgcctcctgcagatgtactttttccactcacttggtatcacagaaagctgtgtcctgacagcaatggccattgacaggtacatagctatctgcaatccactccgttacccaaccatcatgattcccaaactttgtatccagctgacagttggatcctgcttttgtggcttcctccttgtgcttcctgagattgcatggatttccaccttgcctttctgtggctccaaccagatccaccagatattctgtgatttcacacctgtgctgagcttggcctgcacagatacattcctagtggtcattgtggatgccatccatgcagcggaaattgtagcctccttcctggtcattgctctatcctacatccggattattatagtgattctgggaatgcactcagctgaaggtcatcacaaggccttttccacctgtgctgctcaccttgctgtgttcttgctattttttggcagtgtggctgtcatgtatttgagattctcagccacctactcagtgttttgggacacagcaattgctgtcacttttgttatccttgctccctttttcaaccccatcatctatagcctgaaaaacaaggacatgaaagaggctattggaaggcttttccactatcagaagagggctggttgggctgggaaatag

SEQ ID NO: 48276 - DNA, 444 bp, Homo Sapiens
atgatgtggaggcccccaacttccagaagcagctggtactctgctcacacaagcgactgggccggccggccctggacccctagaccccgagccgcctgccgactgcctgcacagggagagcagttgaggcccgggcagggcccccacaccagaccccaacatagcttccccacccaggcaccccctcccggggcagcaggcgtgggagtcagggctgcatgctcctcccctcccacctcacaggcggccttaggcaagtcattttctgtcatcacaaggtcgcctctgcctagtcaggtcctggggtccagagtaaggatgtgcggcccccaggcccccgcacacctccctcagcaccaagaccgggacccccccacccacgtgtctcattgtggctgcctatggactcccgggccttgtgtgcaggccaggcccttccactga

SEQ ID NO: 48277 - DNA, 1261 bp, Homo Sapiens
atggggaaagtgtcctgctgtggcatgaaataaatgaaacagaaaatgatggcaagactgctaagaacatcctttgctttgctcttccttggcctctttggggtgctgggggcagcaacaatttcatgcagaaatgaagaagggaaagctgtggactggtttactttttataagttacctaaaagacaaaacaaggaaagtggagagactgggttagagtacctgtacctagactctacaactagaagctggaggaagagtgagcaactaatgaatgacaccaagagtgttttgggaaggacattacaacagctatatgaagcatatgcctctaagagtaacaacacagcctatctaatatacaatgatggagtccctaaacctgtgaattacagcagaaagtatggacacaccaaaggtttactgctgtggaacagagttcaagggttctggctgattcattccatccctcagtttcctccaattccggaagaaggctatgattatccacccacagggagacgaaatggacaaagtggcatctgcataactttcaagtacaaccagtatgaggcaatagattctcagctcttggtctgcaaccccaacgtctatagctgctccatcccagccacctttcaccaggagctcattcacatgccccagctgtgcaccagggccagctcatcagagattcctggcaggctcctcaccacacttcagtcggcccagggacaaaaattcctccattttgcaaagtcggattcttttcttgacgacatctttgcagcctggatggctcaacggctgaagacacacttgttaacagaaacctggcagcgaaaaagacaagagcttccttcaaactgctcccttccttaccatgtctacaatataaaagcaattaaattatcacgacactcttatttcagttcttatcaagatcatgccaagtggtgtatttcccaaaagggcaccaaaaatcgctggacatgtattggagacctaaatcggagtccacaccaagccttcagaagtggaggattcatttgtacccagaattggcaaatttaccaagcatttcaaggattagtattatactatgaaagctgtaagtaaacttggtgaaaggacacaggtactatcattgaaaaccttgacaatgggtcttcttccattacaccttctttatattttaaaggcctgtgaatatacttataacctgcatatcacaaaataaaacatttttctctcatgttta

SEQ ID NO: 48278 - DNA, 3111 bp, Homo Sapiens
atggcctcggtgccggtgtattgcctctgccggctgccttacgatgtgacccgcttcatgatcgagtgtgacatgtgccaggactggtttcatggcagttgtgttggtgttgaagaggagaaggctgctgacattgacctctaccactgccccaactgtgaagtcttgcatgggccctccattatgaaaaaacgccgtggatcttcaaaggggcatgatacacacaaggggaaaccagtgaagaccgggagccctacgttcgtcagagagctccggagtaggacttttgacagctcagatgaagtgattctgaagcccactggaaatcaactgaccgtggaattcctggaagaaaatagcttcagtgtgcccatcctggtcctgaagaaggatgggttgggcatgacgctgccctcgccatcattcactgtgagggatgttgaacactatgttggttctgacaaagagattgatgtgattgatgtgacccgccaggctgactgcaagatgaagcttggtgattttgtgaaatactattacagcgggaagagggagaaagtcctcaatgtcattagtttggaattctctgataccagactttctaaccttgtggagacaccgaagattgttcgaaagctgtcatgggtcgaaaacttgtggccagaggaatgtgtctttgagagacccaatgtacagaagtactgcctcatgagtgtgcgagatagctatacagactttcacattgactttggtggcacctctgtctggtaccatgtactcaagggtgaaaagatcttctacctgatccgcccaacaaatgccaatctgactctctttgagtgctggagcagttcctctaatcagaatgagatgttctttggggaccaggtggacaagtgctacaagtgttccgtgaagcaaggacagacacttttcattcccacagggtggatccatgctgtgctgacgcctgtggactgccttgcctttggagggaacttcttacacagccttaacatcgagatgcagctcaaagcctatgagattgagaagcggctgagcacagcagacctcttcagattccccaactttgagaccatctgttggtatgtgggaaagcacatcctggacatctttcgcggtttgcgagagaacaggagacaccctgcctcctacctggtccatggtggcaaagccttgaacttggcctttagagcctggacaaggaaagaagctctgccagaccatgaggatgagatcccggagacagtgcgaaccgtacagctcattaaagatctggccagggagatccgcctggtggaattcaacatcactggtgcctgcttgaatgactcagatgacgactcaccagacttggaccttgatggaaatgagagcccattggccctattgatgtctaacggcagtacgaaaagggtgaagagtttatccaaatctcggcgaaccaagatagcaaagaaggtagacaaggctaggctgatggcagaacaggtgatggaagacgaatttgacttggattcagatgatgagctgcagattgacgagagattgggaaaggagaaggcgaccctgataataagaccaaaatttccccggaaattgccccgtgcgaagccttgctctgaccccaaccgagttcgtgaaccaggagaagttgagtttgacattgaggaggactatacaacagatgaggacatggtggaaggggttgaaggcaagcttgggaatggtagtggcgctggtggcattcttgatctgctcaaggccagcaggcaggtggggggacctgactatgctgccctcaccgaggccccagcttctcccagcactcaggaggccatccagggcatgctgtgcatggccaacctgcagtcctcatcgtcctcaccggctacctctagcctgcaggcctggtggactgggggacaggatcgaagcagtgggagctccagcagtgggctgggcacagtgtctaacagtcctgcttcccagcgcaccccagggaagcggcccatcaagcggccagcatactggagaaccgagagcgaggaggaggaggagaacgccagtctggatgaacaggacagcttgggagcgtgcttcaaggatgcagagtatatctatccttcactggagtctgatgatgatgaccctgctttgaaatctcgacccaagaaaaagaagaattcagatgatgctccatggagtcctaaagcccgcgtgaccccaactctgccgaagcaggaccgtcctgtgcgtgaggggacccgggtagcctctattgagacaggtttggctgcagcagctgcaaagctggcccagcaggagctacagaaggcccaaaagaagaaatatatcaagaagaagcctttgctgaaggaggtagaacagcctcgccctcaagactccaatctcagtctgacagtaccagcccccactgtggctgccacaccacaacttgtcacctcctcctcacccctgcctcctcctgagcctaaacaagaggccctgtcaggaagtctcgctgaccatgagtacaccgctcgtcccaatgcctttggcatggcccaggcaaaccgcagcaccacacctatggcccccggtgtcttcttgacccagcggcgcccttcagttggctcccagagcaatcaggcaggacaaggaaagcgtcccaaaaagggcctggccacagcaaagcagagactcggccgtatcctgaaaatccacagaaatggcaaactacttctacgacaggtcatcgttcaagcagaatgcagacaggccattcacgagcccaagttgaagagaagagacgcccatccgtgaaggagcagaccatccatccgatcctccccttcccctgtccttccttcgtggattgtctccattgtccagacagtgcccccacctcccaccgccttgcctcactggcaatctggactcgatggagaacatccccccacctccatttggcactacccaagtggagtgtacccttgccctttccacctgtaccacccactccaacctcaccccagcttgcccaatgcttctggggaatttaatagctaccatgcaggccacagggaa

SEQ ID NO: 48279 - DNA, 1989 bp, Homo Sapiens
attaattacgccaagaaaatcactgacgacctctcggcaagcccctccccagcggtgtgatcctggacccaagggcttgggtgatgcccacacaacacttaaggacaggtctgacccgaccccactacaccacacctagagcccggtcttgcacgggcagggtggggagccgagtgacctctcccggcgcccgccccacctcccgagctggctgggctgccacgtcaggcgcagccggccacgatcctgcccatcctcctcccgcccgtcccattgattcgcgggtttcctgcaaccccgggacccccacgggagatcccggccggagaagcgcccccattcaagcccagagaggggccacgcctgtcggaccccccgtcccacgccaacttttcagacacagcagggccccgcgcagccgggtgcgctccgacagctcaagttcacgcggggaccgactgcagagcggggtcccgcgctgcgacacccggcccggagcccaccccgagggcccgcaggccgctgccccccgggtccgggcacccgttaggccggccgagggggtgtgtcgggccggcgcaggccccgcgagccgtggggtggccgaggtcggcgggtcctcggcgagacccggcccccacgcccgagcctctccgggccttcccccgccgctcaccggcgcaggagcgcgtcttccagatcttcagcagcaggatgacgatggccgccaggtgggacaggtccccagtcagccggaaaatgttcatggcggcggcggcggtggcggtcggcgcagcgcggcggccccggggctgggcggctcaggaggcggcggcccctgagaggaagcggcgaagatggcgagatcgcccgcgacgtggccagggacgtggccgaactgccggcgcgcgcgcgcgcggggcaccctgggagagcggggccaggccccgccccttaaagggggcgcgccccagcgcaggctcagcaggtcagctcgcagggactcccttgcaagaagaccccggactctgccaaattttccctgccgggtttccggcttctcctcgggtgccagcagtttcctttacttttttgaaataacactccctggggatcttttctttcctcccacatatcaaaagagctctacaggcctattgtatgaaaaagtgtaagagaaggccgggtgcggtggctcatgcctgaaattctagcagtttgagaggccgaaacaggaggatcctttgagcctaggagttcgagaccagcctgggcaacctaatgagagttcctccaccccccgtctctacaaaaattttttaaaaaattagccaggcctgatggtgggtgcctgtagtaccagctattttaaaggctaaggcaggaggattgcttgagcccaggacatcgaggctgcggtgaaccatgattgtaccactgtattccagcctggacgactgagtgagaccctgtctcaaacaaaacaaaacaaaacaaaacaaaaaaaagtacaagaggaaaaaaattgatttctgattgcctcactcaagataaggtcaacattgaaggtggaggtggaagatgcagtttatgtaggggtctgaagattttaccattctggggactgtctttaagaaagagaatccaaaattaggtagaaaagtgaacgtctgaccgggcgcggtggctcatccctgtaatcccagcacttaaggagtacgagacgggaggatcacgaggtcaagagatcgacagcatgctggccaacgtggtgaaaccccgtctctactgaaaatacaaaaattagccgggcgtggtggcacgcacctgtaatcccagctactcgggaggctgaggcagggagaatcgcttgaacctgggaggagaaggttgcagtgagctgagatggtgccactgcactccagcctggcgacagagcaagactccatctcaaaaaaaaaaaaaaaaaaaaaaaagaaaaaaaagaaa

SEQ ID NO: 48280 - DNA, 1683 bp, Homo Sapiens
agattccagagagtcctctatttcatatgtgccttccagaacatctcttgtggtattcactacttggcttctgtgttcatgggagtcacccctcatcatgtctgcaggcccccaggcaatgtgagtcaggttgttttccataatcactctaattggagtttggaggacaccggggccctgttgtcttcaggccagaaagattatgttacggtgcagttgcagaatggtgagatctgggagctctcaaggtgtagcaggaataagagggagaacacatcgagtttgggctatgaatacactggcagtaagaaagagtttccttgtgtggatggctacatatatgaccagaacacatggaaaagcactgcggtgacccagtggaacctggtctgtgaccgaaaatggcttgcaatgctgatccagcccctatttatgtttggagtcctactgggatcggtgacttttggctacttttctgacaggctaggacgccgggtggtcttgtgggccacaagcagtagcatgtttttgtttggaatagcagcggcgtttgcagttgattattacaccttcatggctgctcgcttttttcttgccatggttgcaagtggctatcttgtggtggggtttgtctatgtgatggaattcattggcatgaagtctcggacatgggcgtctgtccatttgcattccttttttgcagttggaaccctgctggtggctttgacaggatacttggtcaggacctggtggctttaccagatgatcctctccacagtgactgtcccctttatcctgtgctgttgggtgctcccagagacacctttttggcttctctcagagggacgatatgaagaagcacaaaaaatagttgacatcatggccaagtggaacagggcaagctcctgtaaactgtcagaacttttatcactggacctacaaggtcctgttagtaatagccccactgaagttcagaagcacaacctatcatatctgttttataactggagcattacgaaaaggacacttaccgtttggctaatctggttcactggaagtttgggattctactcgttttccttgaattctgttaacttaggaggcaatgaatacttaaacctcttcctcctgggtgtagtggaaattcccgcctacaccttcgtgtgcatcgccatggacaaggtcgggaggagaacagtcctggcctactctcttttctgcagtgcactggcctgtggtgtcgttatggtgatcccccagaaacattatattttgggtgtggtgacagctatggttggaaaatttgccatcggggcagcatttggcctcatttatctttatacagctgagctgtatccaaccattgtaagatcgctggctgtgggaagcggcagcatggtgtgtcgcctggccagcatcctggcgccgttctctgtggacctcagcagcatttggatcttcataccacagttgtttgttgggactatggccctcctgagtggagtgttaacactaaagcttccagaaacccttgggaaacggctagcaactacttgggaggaggctgcaaaactggagtcagagaatgaaagcaagtcaagcaaattacttctcacaactaataatagtgggctggaaaaaacggaagcgattacccccagggattctggtcttggtgaataa

SEQ ID NO: 48281 - DNA, 1350 bp, Homo Sapiens
tacaccagggctgccgtggctgcagatgccaagcagtgctcggagattgggagggacacactgcgggatggtggctctgcggtggatgcagccattgcagccctgttgtgtgtggggctcatgaatgcccacagcatgagcatcgggggtggcctcttcctcaccatctacaacagcacctctcatgaatgcctcggaagaggagagggagaggggcaggggttgtgggttgggccgaggcacagctgggtggcccccaggctcacgtggcataaagggtttggggtcactaactgtggctctctctccccaggagggctgtcagtggcagtgcctggggagatccgaggctatgagctggcacaccagcggcatgggcggctgccctgggctcgcctcttccagcccagcatccagctggcccgccagggcttccccgtgggcaagggcttggcggcagtcctggaaaacaagcggaccgtcatcgagcagcagcctgtcttaaaggtgcttcgggagggggagagactgaccctgccgcgggtggctgacacctatgagacgctggccattgagggtgcccaggccttctacaatggcagcctcatggcccagattgtgaaggacatccaggcggccgtgagtggagcctctggggctcagcaacatgcacctggctctgatcaaccagggtacaacttctcctgggagagtgtggagacccccgagcagaagggcctgacgtaccaccgcatcgtagaggctttctggtttgcctacgccaagaggaccctgcttgggaccccaactctggggtctcggcaggtggtccgcaacatgacctctgagttcttcgctgcccagctctgggcccagatctctgacaacaccactcacacgatctcctactacaagcccaagttctacacgccggatgacaggggcactgctcacctgtctgtcatcacagaggacggcagtgctgtgtccgccaccagcaccatcaacctctactttggctccaaggtctgctccccggtcagcgggatcctgttcaataatatggacgacttcagctctcccagcatcaccaatgagtttggggtacccccctcacctgccaatttcatccagccagggaagcagccgctctcgtccatgttcccaacgatcatggtgggccaggacggccaggtccggatggtggtgggagctgctgggggcacgcagatcaccacagccactgcactggccatcatctacaacctctggttcggctatgacatgaagcgggccgtggaggagcaccggctgcacaaccagcttctgcccaacatcacgacagtggag

SEQ ID NO: 48282 - DNA, 1726 bp, Homo Sapiens
aaaacctcctgaaacctaggtctggccttcagggaatctgattccttggtctggggtatggcccgggcatctcctgaagctcaccaggtcacacagaggtgtagccccagctgggaaccactgacccagactcagttcctgaatttctgtgaccgcttccatggcagcccctctcaggcccctggtgtgaggtctttcttttgcttctggcttctgagagtttcctttcctgattccaggctgggctcggttttgtctggtgggtttttttgccactgccgttgtgttagtggcatccaggtctccggattactgcatgcttgcagtgggaggaaaggcctgtctaccatgttctctgcctccccttcatgttctgtgaggagaggggccttgtctggcatgttcaccgaggcattcctgaccactagaactgtgcttggcacagagtaggcacttaataaactcctgctgcatgaacaaaagaacaagtgtggatgcttcaaaggaagacttgcacccggctgacccccagagtggggaaggggtcccacctaataggaagaacaccaagacttccccaagaggagaaggaacggctccccctttctcggcgaggccatgtgtctggaccctgtgtgagatgctttctatactagcccttgttggggtgttgcacccattttacagatcaaacaaccaagtttatcagaaattaaagactcatttaagatgccaaagctcacgagtggatggtttgatgctgaagccaacattgttaacaccatctcagctcaaaagccctgaaggccacttaattctaccaaccttcaaccatcttgtcataagacacatcctcgacccaaagcagatattctgtgtagctgatgtgtgtacagattgcaaattcaattgcggaagcatagagaggcaccagaagaggcatcttatgagagtcagccaggactgggaacatttaataagatacagaaaccagatttgcttgagctgaatgctggatcgccatggcaaccttcctttggaggttatccaagtcaggtagtgacagcaaagctgagttaaaggtcacccctgctgagaaagatgggcattgataaaggattttaacaagacccagaggagctggtatttggaagctacctacagaggatcgacgaggccctaggaatgggtggcaaacaacatcaggaagaggggggcatcctgcaggggctcccaccagagccccgacctcgcccttcagatcgggagctccagccttcaccagaagctgagattggagctgttcgtaattgttcaatggaagggggaacaaccattttaaccaggcatccagatgggaaagaaatacacttatgccactctacacccaagacacgcattcctgaaaagttctgaacaagccaaatgcttgcaaatggaacgggcttgaccttctttatcactccagaaatgctttatttaatcttttttctattggagcatcactttaaaacctcaaagttgagaaggcttttctttgcatgatgctgaagccagaagccttcaaggaaacaacataaatataaatatctctgtggccagtctctacaaaaatacataaaaatgaattttaagcataataaaatgtgaaaaattgcccaactttcctcacaaatgagtaaaagccaatttaaatgataagaaatgaataaatgcatattaaagc

SEQ ID NO: 48283 - DNA, 1111 bp, Homo Sapiens
tagttgtgaattctggtcctgccactgtcactgttgatttgcttaaccttgtctgagcccgtctctctgggctgtatctcctcatctatctctgaggtcctttccaattggaagttgcaaagattcattgaggggagcaaggaaggaggagcctcagcctttaggagctttcctttttaaaagaaaaaggtcaacccttggttcttatagatgctcagaacatgttcttgggggaaaacgctgaaaggtttgctttgggccctactgggcctggggaggtctctggagaagagcttggggcagaatgagaagcagcggaagccatgggtggctgcatggaggacgacgcaccccacaaggagaagtgagaccctgcagctgagggagcatcatggcagtgtttctggaggccaaggatgcccattcggtcctgaaacgattccctcgtgccaatgagttcctggaggagctgcgccagggcaccatcgagcgagagtgcatggaggagatctgcagctacgaggaggtcaaggaagtgtttgagaacaaagagaaaacggcattaccactttttcttttgcagatggagttctggaaagggtacccaaatgcagtctactctgtccgagacccctcgcagagctcagatgccatgtatgtggtggtaccccttctgggggtggcactgctgattgtcatcgccttgttcatcatctggaggtgccagctgcagaaagcgacccgtcaccacccctcctatgctcagaaccggtacctagccagtcgcgccgggcacaccctcccccgggtcatggtgtaccggggtactgtgcatagccaaggggagccttctgggcaccgagaggcagcgaacagcccccaggtggtgctggggcccagtcgggggggcaggaccacagtccggctagagagcaccctctacctccctgagctctctctctccagactgtccagcaccacccctcccccctcctacgaggaggtgactgcgccccaagagagcagcagtgaggaggccagcgtgtcttacagtgacccacccccaaagtacgaggagatagtggccgccaaccctggcgctgacaagtag

SEQ ID NO: 48284 - DNA, 198 bp, Homo Sapiens
gttctggaggctgggaagtggaagagcattgtgccagcacctggtgagggccttcttgccgtgttacacatgatggtttttactgatgccctgcacagagagaggtctgtaaagtggcaagcaggagtctgctacaatggaggaaaggattttgctgtatctcttgccaggcccaaggctgcagagggaattggtaat

SEQ ID NO: 48285 - DNA, 1208 bp, Homo Sapiens
tccagttaggagccttgatgccggaggggacagtgggtcgccgagagcgcccggagggaaccgcctggccttcggggaccaccaattttgtctggaaccaccctcccggcgtatcctactccctgtgccgcgaggccatcgcttcactggaggggtcgatttgtgtgtagtttggtgacaagatttgcattcacctggcccaaaccctttttgtctctttgggtgaccggaaaactccacctcaagttttcttttgtggggctgccccccaagtgtcgtttgttttactgtagggtctccccgcccggcgcccccagtgttttctgagggcggaaatggccaattcgggcctgcagttgctgggcttctccatggccctgctgggctgggtgggtctggtggcctgcaccgccatcccgcagtggcagatgagctcctatgcgggtgacaacatcatcacggcccaggccatgtacaaggggctgtggatggactgcgtcacgcagagcacggggatgatgagctgcaaaatgtacgactcggtgctcgccctgtccgcggccttgcaggccactcgagccctaatggtggtctccctggtgctgggcttcctggccatgtttgtggccacgatgggcatgaagtgcacgcgctgtgggggagacgacaaagtgaagaaggcccgtatagccatgggtggaggcataattttcatcgtggcaggtcttgccgccttggtagcttgctcctggtatggccatcagattgtcacagacttttataaccctttgatccctaccaacattaagtatgagtttggccctgccatctttattggctgggcagggtctgccctagtcatcctgggaggtgcactgctctcctgttcctgtcctgggaatgagagcaaggctgggtaccgtgtaccccgctcttaccctaagtccaactcttccaaggagtatgtgtgacctgggatctccttgccccagcctgacaggctatgggagtgtctagatgcctgaaagggcctggggctgagctcagcctgtgggcagggtgccggacaaaggcctcctggtcactctgtccctgcactccatgtatagtcctcttgggttgggggtgggggggtgccgttggtgggagagacaaaaagagggagagtgtgctttttgtacagtaataaaaaataagtattgggaagc

SEQ ID NO: 48286 - DNA, 1143 bp, Homo Sapiens
atggtgggctctggcctcctgtggctggccttggtctcctgcattctgacccaggcatctgcagtgcagcgagacccatccactgtggaggacaagtgtgagaaggcctgccgccccgaggaggagtgccttgccctcaacagcacctggggctgtttctgcagacaggacctcaatagttctgatgtccacagtttgcagcctcagctagactgtgggcccagggagatcaaggtgaaggtggacaaatgtttgctgggaggcctgggtttgggggaggaggtcattgcctacctgcgagacccaaactgcagcagcatcttgcagacagaggagaggaactgggtatctgtgaccagccccgtccaggctagtgcctgcaggaacattctggagagaaatcaaacccatgccatctacaaaaacaccctctccttggtcaatgatttcatcatcagagacaccatcctcaacatcaacttccaatgtgcctacccactggacatgaaagtcagcctccaagctgccttgcagcccattgtaagttccctgaacgtcagtgtggacgggaatggagagttcattgtcaggatggccctcttccaagaccagaactacacgaatccttacgaaggggatgcagttgaactgtctgttgagtccgtgctgtatgtgggtgccatcttggaacaaggggacacctcccggtttaacctggtgttgaggaactgctatgccacccccactgaagacaaggctgaccttgtgaagtatttcatcatcagaaacagctgctcaaatcaacgtgattccaccatccacgtggaggagaatgggcagtcctcggaaagccggttctcagttcagatgttcatgtttgctggacattatgacctagttttcctgcattgtgagattcatctctgtgattctcttaatgaacagtgccagccttcttgctcaagaagtcaagtccgcagtgaagtaccggccatcgacctagcccgggttctagatttggggcccatcactcggagaggtgcacagtctcccggtgtcatgaatggaacccctagcactgcagggttcctggtggcctggcctatggtcctcctgactgtcctcctggcttggctgttctga

SEQ ID NO: 48287 - DNA, 712 bp, Homo Sapiens
gcgttgaggctgcggtcatggagggagcaggagctggatccggcttccggaagggagctggtgagcaggctgctgcacctgcacttcaaggatgacaagaccaaagaagcagcagtccgcggcgtgcggcaggcccaggcagaagacgcgctccgtgtggacgtggaccagctggagaaggtgcttccgcagctgctcctggacttctagggatctcagccgtggctgaggccacccccagaggagcccctggtccacagaagcaggccttgtgtttccagcggcctctgataagaggcagggaaggacctgaaggatttggagttgattcaaacaagatctctgggagtctccagcctgtgcagaaggggcaggactgcagtgcactgcgggccttggagtgtccagtggggacactggtgtgggaaggggcagcacctggggagtccctgcctctcctccctgggacaatagtgtgcatgccacccggggtcctacaggcaggtgctgggaaaggcctggccagcaggtagcctgtgtgtttgacaaacagcagctggcagcgctgcctcctgcccacattcctgccacccgacatcaaagctggcgtgtgacctttccagccatgcgatattccccttggaagatgcttccccaggctataaatttgttctcacaaagcaacatcaataaatcaaaactgtctctccca

SEQ ID NO: 48288 - DNA, 2300 bp, Homo Sapiens
attgtgttctgactgcgatgtggcgcttgcgatctctcgccgccggcagaggctcctcgaagagcgacacggggctgaccaggcacggtggtcaaagccgcagagggagagcgggagcggtcgtgaggtcgtctggggagaagggcggaggcaaagccgaggagcaggtgtgtggacccttctagcctgaggagtcctgcaggtgtgaagctccacacctgcctccatagcactttgcctgtccctaagagggctcatcggagaagaaagaatggctgtcagccacctgccaaccatggtccaggaatcggtgaccttcaaggatgtggctatactgttcacccaggaagagtgggggcagctgagccccgcccagagggccctgtacagggacgtgatgctggagaactacagcaacctggtctcactgggactcttaggacccaaaccagatacgttttcccagctagaaaaaagggaagtgtggatgccagaggacacccctggaggcttctgtcttgactggatgactatgcctgccagtaagaaatctactgtcaaggcagagattcctgaagaagaattggatcaatggacaataaaggaaagattcagtagcagtagtcactggaagtgtgctagcctgctggagtggcaatgtggaggccaggagatcagtttgcagcgagtggtactcactcaccccaacaccccatcacaggaatgtgatgaatccgggagcactatgagctcatctcttcacagtgatcaaagtcagggatttcaacctagcaaaaatgcctttgagtgtagtgagtgtggaaaagtcttctctaagagttcaactcttaataaacatcagaaaattcataatgaaaaaaatgcaaatcagaaaattcatattaaggagaaaagatatgaatgtagagaatgtgggaaagcctttcaccagagtacgcaccttatccatcaccaaagaattcacactggcgagaaaccctatgaatgtaaggaatgtggcaaggccttctcagtgagctcctcacttacgtaccatcagaaaattcatactggagagaagccttttgaatgcaacttatgtggaaaagcttttatccgaaatatacaccttgcccatcatcatagaatacatactggagagaaaccttttaaatgtaacatttgtgaaaaagcctttgtgtgcagggcacaccttaccaaacaccagaatatccacagtggagagaaaccctataaatgcaatgaatgtggaaaagcctttaatcagagtacaagtttccttcagcatcagagaattcacactggagagaaaccctttgaatgtaatgaatgtgggaaggccttcagggtgaactcttcccttactgaacatcagagaattcatactggagagaaaccttataaatgtaatgaatgtgggaaagctttcagggataattcatcctttgcacgacatcggaaaattcacactggagagaaaccttacagatgtggcttgtgtgagaaagcctttcgggaccaatcagcactagcccaacatcagagaattcatactggggaaaaaccttatacatgtaacatatgtgaaaaagccttcagtgaccattcagcccttacccaacataagagaattcatactagggaaaaaccttacaaatgtaaaatctgtgagaaagcctttatccgaagcactcacctgactcaacatcagaggattcacacaggagagaaaccctataaatgtaataaatgtgggaaagcttttaaccagactgcaaacctcattcagcatcagagacatcatattggagagaagtgatatgaatgcagtttgtatggaagacctttgagactgagtagatgaattattgaatgtgagataatccgttctagagaataactatgaaagcttgcatcaagatagtcactttatttactgagggtcaggtttcacagtgtcatggggtttgggcatttaagaatggcaaacactcggctgggcacagtggctcacgtctgtaatctttgggagcactttgggaggccgaggtgggcggatcacgaggtcaggagatcgagaccatcctggctaacagggtgaaaccccatcgctactaaaaatataaaaaattacccgggcatggtggtgggcgcctgtagtcccagctactcgggaggctgaggcaggagaatggcatgaacccgggaggcagaggttgcagtgagccgagatcgtgccactgcactccagcctgggcgacagagcaagactcagtctc

SEQ ID NO: 48289 - DNA, 846 bp, Homo Sapiens
gctgactgtgctgttctgattgttgctgctggtgtcggagaatttaaagctggtatctccaaaaatgggcagacctgtcagcatgcccttctggcttatatgctggtgaagcaactaattggtgttaacaaaatggattccactgagccaccctacagccaatacagatatgaggaaatcattaaggaagtcagcacttacattaagaaaattggctacaaccccgacacagtagcatttgtgccaacttctggtgggaacagtgacaacatgctgaagccaagtgataacatgccttggggaaccatgctactcgaagctctggactgcatcctaccactaactcatccaactgacaaacccttgcatctgtctctccaggatgtctacaaaactggtgatattggtactgtgcctataggccaagtggagactggtgttctcaaacccggaatggtggtcacctttgctccagtcaatgttacaactgaacagtctgttgaaatgcaccatgaagctttgggtgaagctcttcctgcagacaatgtggacttcaatgtcaagaatgtgtctgtcaaagatgttcatcacggcaacgttgctggtgacagcaaaaatgacccaccaatggaagcagctggcttcactgctcaagtgattatcctgaaccattcaggccaaatcagtgctggctatgccactgtactggattgtcacacagcttacacagcttgcaagtttgctgacctgaaaaagattgatcaccattctagtaagaagctggaagatggccctaaattcttgaagtctggtggtgctgccatagttgatatggttcctgacaag

SEQ ID NO: 48290 - DNA, 1326 bp, Homo Sapiens
acccaggaggaggtactccccttacaggctgacgttgtccaacgtgaggaggaattgaattccctgaagcagaagctggcagcggcccttttggcggagcaggaaccgcagccagaacgactggtttcggtgttgcagctgccgcggaaggccgctgtgttccaagatgagattctgcgctctagccggcagttagtgctgcccgagctgggcgtgcacagacacgtgctagtcgtgggctgcggtgggctccgctgtccactggcgcagtacttggcagcggccagcgtgggccgccttggccttgtggattatgatgtggtagagatgagcaacctggcctaccaagtgctgcatggcgaggcactggctgcacaggccaaggccgcttcggccgccgcctcgctgcgcggcctcaatttggcggtggaagcggtactctcaggcccttttatgccggtccctaccctagacccgctccgccgatatgatgtggtggactgctcggacaacgtgtccactcgctacctggttaatgacgcatgtctggccggttgggccctagtgtctgccagcgcctggagggctatcacagtctaccattatgacggtgggccttgctatcgctgcatattctcccagccacccccggcggagacagtgaccaactgcgcggatggcgggatgctccgtgtcttaaccggggtcctgggctgcctgcaggccttgaaagtgctgaaaattgctgcgagtctgggcccctcttacagtggcagcctgttgctctttgatgccctgagagggcatttctgctgtattcggctgcggagctgcaggctcgactgtgcagcttgcgggaaatggcccactgtgactcatctgctggactatgaagccttctgtggctcctcagccaccgataaatgccgctccctgcagttactgggcccagaggatcgtgtttctgtcactgactataagcgacttctggattctggggcaccccatctgttgctggacatcaggcctaagatggaggtgagcatctgtcttttgcctcatgccctacacatccctgaacgcagggatgcggagagcctgaagctcttaggagaagcagtccggaaagggaaacagggcacacaagaaggggctgctctcctcatttatgtgatttacaaactgggaaatgaatcacagaaagccgtgaagatcctccaggcctcatcagcagctcaagagttagactatttaacagtttggaatattgtgggggacctcatggcctgggctgcccaaaacggtggaacatttccacagtactaa

SEQ ID NO: 48291 - DNA, 1515 bp, Homo Sapiens
acaaagagcggggcggagaggcagctgcggggggagccggcggccgctgctgccgcccagggctctggggccccgccggccaggcccgccgtccgcggccagtgcccttcctcctcctcctcctctgccgccgcctcctcagtcgccgccgcctcctcagtcgccgccgcccgcgccgcccgcgccctccgcgcgcctctgagcccgcgccgggccgcgccggccccttcccatgcgggcggcgcgggccctgggaggggcgcccggagccagccgcgcagcatgcactggggggttggctttgcttcgtccaggccgtgcgtggtggatctgagctggaaccagagcatctccttcttcggctggtgggccgggtccgaggagcccttctccttttatggggacatcatcgctttccctttgcaggattacggtgggatcatggcagggctgggctccgatccctggtggaagaaaaccctttacttgaccgggggagctttgctggccgcagctgcgtatctgctccacgaactcctggtcattaggaaacagcaagagattgactctaaagatgctattattttgcatcagtttgcaagacctaacaatggtgttccaagtttatctcctttctgtttaaagatggaaacttatttaaggatggctgacttaccgtatcagaactattttggtggaaaactctctgctcaagggaaaatgccttggattgaatataatcatgaaaaagtttctggcacagaattcataattgactttctggaagagaagcttggagtgaatttaaacaaaaaccttggccctcatgaaagagccatctccagagcggtgaccaagatggtggaggagcacttctactggacattagcttattgccagtgggtggacaatctcaatgagacccggaagatgctctctcttagtggtggtggtcccttcagcaacctgctgaggtgggttgtgtgccacataacgaaaggaattgtgaaacgcgagatgcacggccacggcattggccgcttctccgaggaagagatttacatgctgatggagaaggacatgcggtctttagcagggcttttgggtgataagaagtacatcatggggcccaagctttccactcttgacgccactgtctttggacacttggcacaggcaatgtggaccttaccagggacaagacccgaacggctgatcaaaggcagtgagctgatcaaccttgccatgtactgtgagaggataaggaggaaattttggccagagtggcaccacgatgatgacaataccatctatgagtctgaggagagcagcgaaggcagcaaaacccacaccccgctgctggattttagcttttactcaaggacagagacctttgaagatgagggagcagaaaacagtttttccagaaccccagacacagattttactggacactcactctttgattcggatgtggacatggatgactatacagaccacgaacagtgcaagtga

SEQ ID NO: 48292 - DNA, 3293 bp, Homo Sapiens
atgggctgcgacggccgcgtgtcggggctgctccgccgcaacctgcagcccacgctcacctactggagcgtcttcttcagcttcggcctgtgcatcgccttcctggggcccacgctgctggacctgcgctgtcagacgcacagctcgctgccccagatctcctgggtcttcttctcgcagcagctctgcctcctgctgggcagcgccctcgggggcgtcttcaaaaggaccctggcccagtcactatgggccctgttcacctcctctctggccatctccctggtgtttgccgtcatccccttctgccgcgacgtgaaggtgctggcctcagtcatggcgctggcgggcttggccatgggctgcatcgacaccgtggccaacatgcagctggtaaggatgtaccagaaggactcggccgtcttcctccaggtgctccatttcttcgtgggctttggtgctctgctgagcccccttattgctgaccctttcctgtctgaggccaactgcttgcctgccaatagcacggccaacaccacctcccgaggccacctgttccatgtctccagggtgctgggccagcaccacgtagatgccaagccttggtccaaccagacgttcccagggctgactccaaaggacggggcagggacccgagtgtcctatgccttctggatcatggccctcatcaatcttccagtgcccatggctgtgctgatgctgctgtccaaggagcggctgctgacctgctgtccccagaggaggcccctgcttctgtctgctgatgagcttgccttggagacacagcctcctgagaaggaagatgcctcctcactgcccccaaagtttcagtcacacctagggcatgaggacctgttcagctgctgccaaaggaagaacctcagaggagccccttattccttctttgccatccacatcacgggcgccctggtactgttcatgacggatgggttgacgggtgcctattccgccttcgtgtacagctatgctgtggagaagcccctgtctgtgggacacaaggtggctggctacctccccagcctcttctggggcttcatcacactgggccggctcctctccattcccatatcctcaagaatgaagccggccaccatggttttcatcaacgtggttggcgtggtggtgacgttcctggtgctgcttattttctcctacaacgtcgtcttcctgttcgtggggacggcaagcctgggcctgtttctcagcagcaccttccccagcatgctggcctacacggaggactcgctgcagtacaaaggctgtgcaaccacagtgctggtgacaggggcaggagttggcgagatggtgctgcagatgctggttggttcgatattccaggctcagggcagctatagtttcctggtctgtggcgtgatctttggttgtctggcttttaccttctatatcttgctcctgtttttccacaggatgcaccctggactcccatcagttcctacccaagacagatcaattggaatggaaaactctgagtgctaccagaggtaaaactgggtgaagaaggcaagagaagactttcagcctcttgatcaccagcacgaccatactgtttcagaaagctgggtggtggtggaggcgctctctcaatggctattcaagtcttctccactaaaacttggttgggtagaggaaattaaattgagtcctggtacctggtcaaaatcattagaagtttacctggcttctcaagttatcttcttccctggttcagactgttggtaagagctgtccagatacccagatgggaaggaaggagacagccgcgcgcttcactccatttgtcacctcatgcatggaccatactctgggtttgagatcattcttcattgaagtttgtaaaaataggttgaaattgtaaagctccatgatcattgctatatgtagatatatttcaatttaagcaaaacaagctgcaagttattccctggcatgctcaaaggattttcgtgcttttcacttaatagtccaaagtctcttaaattcctgctgcagacatcaatagcttatctatattctcaaacaccaaaaggaaaagttgaatcttgctctctttggtatactaatgtagtggtatgctaagctggctcataccaacttagaaaagctgattgtaaaattttcattttgacagctggttattaaatgcagccattattaaaaatcaaatcatacaaacttataattaaatcaattacatttaaaacaaaggtaataaatattcaaagcatatcacttcctaatttgatcttgatgctcttgaggtaatttacgtccatggtacctgtgtggtggaattactatatatgatggtgtgctactgtgcaccttgtctcaactccactcttcgtgatagcatgttggtagcttgaaatcagcctggtgggagtattaccatggacactggcaaaagctacagatcccggagagccagtggttaaacatttaccagcataccactgctagtaatcaaggctaactggtccagaaatcgcccaggagaatgaaatggatgttccatttttttctactgacattgactagcatataaaaggtatagaaacagcactaagactttctgaaaatacctaatgaaaattttacatctttttttgtttttgtttttgtttttgagacagagtctcactctgttgccaggctggaatgcagtggcgtcatctcggctcactgcaacctccgcctcccagtttcaagcgattctcctgcctcagcctcccaagtagctgtgactacaggcgcatgccatcacgcacagctaattttttgtatttttagtagagacgggatttcaccgtgttagccaggatggtcttgatctcctgacctcatgatctgcccgtctcggcctcccaaagtgctgggattacaggcgtgagccactgcacccagccaaaaattttacatcttttatagagggaaaaaaactctttataccatggcaaggccttttctttcacaaaaagctgggcctactgaacaattcaagctgtgcagtagtagactgaaagcaggatttgttgaggagttacagctcctgtccagagcaaatcctgtagtgatacaaggagaatgtaaacttgccagcttagacagggatcagtcctgagactgctggcagtagcaaatggctattagagtaactgtataatggttttgcctgcactttctctatgtatatacaaatgtacatgtataaatataaaaattaagtgatcatg

SEQ ID NO: 48293 - DNA, 945 bp, Homo Sapiens
atgggggatgtgaatcagtcggtggcctcagacttcattctggtgggcctcttcagtcactcaggatcacgccagctcctcttctccctggtggctgtcatgtttgtcataggccttctgggcaacaccgttcttctcttcttgatccgtgtggactcccggctccatacacccatgtacttcctgctcagccagctctccctgtttgacattggctgtcccatggtcaccatccccaagatggcatcagactttctgcggggagaaggtgccacctcctatggaggtggtgcagctcaaatattcttcctcacactgatgggtgtggctgagggcgtcctgttggtcctcatgtcttatgaccgttatgttgctgtgtgccagcccctgcagtatcctgtacttatgagacgccaggtatgtctgctgatgatgggctcctcctgggtggtaggtgtgctcaacgcctccatccagacctccatcaccctgcattttccctactgtgcctcccgtattgtggatcacttcttctgtgaggtgccagccctactgaagctctcctgtgcagatacctgtgcctacgagatggcgctgtccacctcaggggtgctgatcctaatgctccctctttccctcatcgccacctcctacggccacgtgttgcaggctgttctaagcatgcgctcagaggaggccagacacaaggctgtcaccacctgctcctcgcacatcacggtagtggggctcttttatggtgccgccgtgttcatgtacatggtgccttgcgcctaccacagtccacagcaggataacgtggtttccctcttctatagccttgtcacccctacactcaacccccttatctacagtctgaggaatccggaggtgtggatggctttggtcaaagtgcttagcagagctggactcaggcaaatgtgctga

SEQ ID NO: 48294 - DNA, 1350 bp, Homo Sapiens
gggttagttgtcagtatctttcccagttgttccgccccctacccccgcctcccgcaccgcgcccctctccggctgccctctccgcgtggggcaaggctccgagggcagcattcagtagccatttagctttggaaggagaggtgattcgaatggcccggctcctcctgtcaccatgctaggcactttggccgcgcaggtgctgacctgaacctggttcatccctttctgaccaaaactgttcactcaccgtggaagggactaagcatccatatggagacgccaccagtcaatacaattggagaaaaggacacctctcagccgcaacaagagtgggaaaagaaccttcgggagaaccttgattcagttattcagattaggcagcagccccgagaccctcctaccgaaacgcttgagctggaagtaagcccagatccagccagccaaattctagagcatactcaaggagctgaaaaactggttgctgaacttgaaggagactctcataagtctcatggatcaaccagtcagatgccagaggcccttcaagcttctgatctctggtactgccccgatgggagctttgtcaagaagatcgtaatccgtggccatggcttggacaaacccaaactaggctcctgctgccgggtactggctttggggtttcctttcggatcagggccgccagagggctggacagagctaactatgggcgtagggccatggagggaggaaacttggggggagctcatagagaaatgcttggagtccatgtgtcaaggtgaggaagcagagcttcagctgcctgggcactctggacctcctgtcaggctcacactggcatccttcactcaaggccgagactcctgggagctggagactagcgagaaggaagccctggccagggaagaacgtgcaaggggcacagaactatttcgagctgggaaccctgaaggagctgcccgatgctatggacgggctcttcggctgctcctgactttacccccacctggccctccagaacgaactgtccttcatgccaatctggctgcctgtcagttgttgctagggcagcctcagttggcagcccagagctgtgaccgggtgttggagcgggagcctggccatttaaaggccttataccgaaggggggttgcccaggctgcccttgggaacctggaaaaagcaactgctgacctcaagaaggtgctggcgatagatcccaaaaaccgggcagcccaggaggaactggggaaggtggtcattcaggggaagaaccaggatgcagggctggctcagggtctgcgcaagatgtttggctgattaaaagttaaaccttaaaagagacaggaa

SEQ ID NO: 48295 - DNA, 570 bp, Homo Sapiens
atggccctgtccttttctttactgatggccgtgctggtgctcagctacaaatccatctgttctctgggctgtgatctgcctcagacccacagcctgggtaataggagggccttgatactcctggcacaaatgggaagaatctctcatttctcctgcctgaaggacagacatgatttcggattccccgaggaggagtttgatggccaccagttccagaaggctcaagccatctctgtcctccatgagatgatccagcagaccttcaatctcttcagcacagaggactcatctgctgcttgggaacagagcctcctagaaaaattttccactgaactttaccagcaactgaatgacctggaagcatgtgtgatacaggaggttggggtggaagagactcccctgatgaatgaggactccatcctggctgtgaggaaatacttccaaagaatcactctttatctaacagagaagaaatacagcccttgtgcctgggaggttgtcagagcagaaatcatgagatccctctcgttttcaacaaacttgcaaaaaagattaaggaggaaggattga

SEQ ID NO: 48296 - DNA, 1338 bp, Homo Sapiens
cagaacttccactgaatacactagaaaatacagagcatttttgcagaaattatgtttgaattatttaatgtaccaggattctacattgcagttcaggaggtactagccttggaagtatcttggacatctcaacaagtgggtgaatatatgttaatgagtatagtcattgacaaaggagatggagtcacccttgttctcccagttgtagaaggttatgtaattgggagctgcatcaatcacatcctgattgtaggtgatactgtgtatttcattcaacagctgctaagggagagggaggtaggaatccctcttgagcagtcactggagaacacaaaagccattaaggagaaatactgttacatttgccctgatatagtcaaggaatttgctaagtatgatgtggatccctggaagtggatcaaacagtacacaggtatcaatgtgatcaaccaggagaagttcataatagacgttggttacaaaaggttcctgcaacctgaaatatttttttacccagagtttgccaacccagactttatggaatccatcttgaatgttgttgatgaatacaaaactgtcccattgatgcgcattgtccactgtataagaatgttgttctttcaaggggtttgaccatattcagggatttgaatctcaactacagagagatttgaagagtggtacatgccagattaaaactcaataaggagctcagtggcaggagaatcaaacctaagcttacaaaggttcgggtggtaatcaatcacatgcagcactatgccttatggtttggaagcttaatgctagcctcaactctggagttatttcaggtctgtcacaccaagaaggactataaagaatatggccccagcgtctgccaccagagccttctctttggaataatgtcttagtgtctgccttgaaagcatcatttaatagtgtcatgttggggaacaagtgtccttcagaacccagagaagactaccatttctaaatgacatttggtgttgatgtctgagcagcatgcttgcaccacctagtgcatgaggcacagggcagagtcatttcagtaaaagccatttctttatgtgttgactgttgtatgcccactcctccttctctcactccctttcttcatgcttccccagtttccctcctccttttcacttgaacttttttgttgacaaataccattctgaaggaattcaaatgtgactctgaaaattgttaagaggaaaaaaaatttcaaaaatggcccaaaatagttctcccccaggaaagaatgcagtggtataaatccttttcccccagcttatttttataaataaaatgttataa

SEQ ID NO: 48297 - DNA, 402 bp, Homo Sapiens
atgcccatctccagtgagttggcaccttcatctcccagatcagctgctattctgacttctgtcactgtaggtgagttcgttcttggacttcatacaaatggagtcattcagtattttctttccttttgtgcctggctgcttttactcaccatggctttttttgttttttgttttttgttttttagacggagtctcgctctgtcacccaggctggagtgcagtggtacaatctctgctcactgcaagctccgcctcccgggttcacgccattctcctgcctcagcctaccgagtagctgggactacaggcacctgccacctcgcccggctaattttttgtatttttagtagagacgggtttcaccgtgttagccaggatggtctcgatctcctgaccttgtga

SEQ ID NO: 48298 - DNA, 510 bp, Homo Sapiens
caggcacccaagagggccaagagaaggacagtagagggcggaagctccagcgtcttctccatgttcgaccagactcagatccaggagttcaaagaggccttcactgtgatcgaccagaaccgtgatggtattatagacaaggaggaccttcgggacaccttcgcagccatgggccgcctcaatgtgaagaatgaggagttggatgccatgatgaaggaagccagcggtcccatcaacttcaccgtcttcctgaccatgttcggggagaagctcaagggtgccgaccctgaggatgtgatcaccggagccttcaaggtcttggaccctgagggaaagggcaccatcaagaagaagttcctggaggagctgctgaccacgcagtgtgaccgcttctcccaggaggagatcaagaacatgtgggcggccttcccccccgacgtgggcggcaacgtcgactacaaaaacatctgctacgtcatcacgcacggcgacgccaaggaccaggagtag

SEQ ID NO: 48299 - DNA, 653 bp, Homo Sapiens
gggacgagggcgcgtgggtgaggaaggtcaggtctaggaactctaactccttgccactcaagaaatgtcctccctttcagaatatgccttccgcatgtctcgtctcagtgcccggctatttggtgaagtcaccaggcctactaattccaagtctatgaaagtggtgaaactgtttagtgaactgcccttggccaagaagaaggagacttatgattggtatccaaatcaccacacttacgctgaactcatgcagacgctccgatttcttggactctacagagatgagcatcaggattttatggatgagcaaaaacgactaaagaagcttcgtggaaaggagaaaccaaagaaaggagaagggaaaagagcagcaaaaaggaaatagtgttggtccctcaagagggagactttcttcctcagtggcggagagaagaaagtgcatttattgtctttccacctattggaggaatgtcatcttcctaaatgaagtttatttggaggaacacagtcatctccttggtgaaatctaatccggttacattgtggctggtttcttgaacacattctaactgtgcaaaattatcttggccttggccgtgtaatgtgaggtttacctgattctctaatgaaataaatacctaagttattgtttg

SEQ ID NO: 48300 - DNA, 5525 bp, Homo Sapiens
atagtcagtgtgagtttgagaaagaaaaacacactgtagagctctactataaaagttaataggatagattgttaaactacattctgccatctttggctatttggttgctaaatactttagaatattacttacagctaggctgattataacagaagaaggattaagtatgacagcttgtctcaataatggaagtaaaaagcagagatcctggaaagaatctgccatccatcagaggaatttgtctgactttgtggtattgctagggggtgtatggttggagtattattttgatggtgctggatcaccctcatcacagtaaactcaagaacataggacagcttgtgaaataggttcttacttgtaaggaggaacatatgcagcagaaaaaagaggaggaagaagttcttaaagaagtaactgcacatttccaaattactttaactgaaactcaagcccagctggaacagcatgaaatacacaatgccaaactgcagcaggagaacatggaaatgggagaaaagctaaagaagctcactgaccagtatgcactgagggaagaggtaaacggcgtttggtttgtttatagacagctgctcaccagtagcaaaagctacaccctaccgtaaagtaaaaactctttcacaggacagtattttagaacttttgtgtatgcacagtggaaattacatgtttattaggaaaagagtagaaacctgtaaacagaatgactaaattggagcatcacttggcccaagtgtcagtggagtaggataagtaaagggatttctaggagatgtgtaccacttgtctcccatatgatgctacaagattgtcaatatagcatacagatatttttctcttatgcagtctaataatacagatttgttccctaaatactctgtatctcagatttctgtgacaatctgaacaatataaataggagaattgtgctatttgtgagaataaggaacctactaattacccatcaccaagtcacattgtttgtgtaatcaatgaagtaaaaagtttgtggaggactcaatagttgtcgaacctagtcattggagttattttataaattgatgtggaagttgtatgatggctaaataaaaaacaaataggtgataacctgcttatttgtttttattttttctttacttttagaggtctatacatagggtaagatttcaattttcaaaggatgcatccccttcctttattatgctttaagctagtaaaatatatatttaaatccttacttagtagattaaaattggaaatagaaagtgacaatttaaaaattaataaaacagtaaatattactttatgcatatcaaaatgttattttgagttacaccttttcatgctacttttgaaaacatttttctttaagattttgagtatcttttaaaccattttcctctatgtttcaagaacatttcaaacttattatggaagctgcaaacttatagtagaatatatcacttggctttagcaattatttacttttgtttctagcaactcttgtttccatctatttttaagcaaatccaagatattatatcattttatttattactattcaaatatgcatcatgaaataagattctttttaagccataatcactgtactatttttactccaaaaggttaaacaattgctatgtaatcacataccttctcactgtactatttaaatatctgttacttcccttttccttcaggttgtttacatcaacatcaaaataaggtttatacattttattgttttaatatgtctcaagtctttttagtatataagcttcccccccctcttttttttccttggaatgtatttattaaagaaattttttaggcctatatagtgaacttttaaaattaaatttgttttatattataaagcatattatgaatatcatcagtttttttaaaagaatcctttaaattccattgttttaaataatggtattaaaaatgattaattttattttattttttattattttactctttaggatttatattattttaactgtattaaactctccaaatttgctatagaagtagcagattgggagaggacatgtgttcaagttgtactacttgtatgtcttgtttagatattacagtctttttcttttatcagaaaataattgaataatgataaaatcagttgcagattaagacagattatctgttgcagtcttctcaaaacttaatttaagtacattattttcagctagcatttcttccttcacatagaacctccatgtgtggagggatttcctaatgagtctattgtatgtacaatagcacttaatgacatagcttttaaataataacaggattttaccaaatgtttaatatgtgccaggcatcaagcaccttacacagtttaattattgcatagatttggacagcaactctgcaagttaggtatggtcatgaacctttgcagataaggaaactgtgtttcacaaggagaagaaattgtcctggatcatacaataagctaggatttgctccagaccatttttttcattttatcaggctacctacaattaaggaatttcagaagattttgtgaacaaaaaatgtccaggaattatgtgtgtaataaatgaatttgatattttgatctccttatccatctttttcttgataaaatatcagcttttttttttccaatgtagggcagaagcaagaagtacagatattttgatggggacagcccacgtctgatagggtgggacatggggcagcagttagagggttgtgctctttctagtgtgggatagtttgcaagatgatatgttgtagccacttctgcagtgacggggacagaaggagtcagtgttcttaactacagtggtagcagcagaaaagaagggtaagcagggttctagaaatttgtgttatgttttctccccactgtatttatttctttggttagtggtgcaagaaattctgttttcctgtagcaaattaataaagcgttcaaacataaggaattacgacaacagcttgtagatgccagacttcaacaaacagcacagctgataaaagaagctgatgaaagacatcagagagagagagagtttgtaagttctacttcttggaaaaaaaaaaaagatcgccaaaattgtaaccaaagccatttaaaacaaactcctcacttaacatagtgccagggcatgcaattttgtttcttactctctggatgtgggatatgcgagtgtgtgtgtgtgtgtgtgtgtgtgtgtattaagctttctgtttctgatgaaattttcatatgaaatttactggagataagattaaattagtggaaaaacaagataattttgctttctatgtagtggtcaccaagttaaagaattgtgccagttattaggcaagataggctttgagatttagggacagttaaattttacaccaacttagtgaacatgagacttctacctagtgttacatttcatttttaaataagcaatttaaaaattggtaaatgatttgtttactttgattatattctggtataattttctgacaaaattatctgtgtcttggtcagcattgttgctagaatatgtattcagattttgtctgtccataattgagaacacagaaaaaatctaatttgactatacccatttacccccatggaaatgaaactatattctatgaatgaaaaatgattttaataatgtggtgtattacattttcttcattcaagtaatgtaggccctgagtagagcatgttatgaatatttagttccttagtgttttctcattcaagcctctcatattgaatgagtctagggtttggagagatgtttcacacagcatgtctcttcagtgcaagctgacagatatcagtgcacaattaaagaaacttaattgcacctttcaacttggagtataaattttgtatgtatctatgtatatctatgtgtgtattttgtggtttaaggcttatttacataatatgtgacattttacctcagaaattcagtgactgaatttcacagctgcttcccatgcatctttattatctatgtttctgaaaaactcaaatactaactaatctcttttcttcccttagctgttcctttcctgtggttttaaaaaagtgaccagaaactaggtctctattttcattgctttgctgcatattcttttaacctgcttttatcttttacagagttgaggggctttctaaataacctagacaatgtcaagattcttagctgcgttttctgtctaaaagtgtagatgtctagttattcctcatgtaaaacacaacatttcaaccctgagtactataaactttattatgcttctaggttactttttctctttaagcaattattcctacattcctaagtgttcaccagtggaacagataagagatagaagtagttagaaattgagataattgggttgacctgtcattgttgccaggataattactggaagattaagcctatctgttagacattttgaccatgtttataattgttgttagtattctgtcagaatgtatctgttttctagttattaaaagaagcaacagaatcgaggcacaaatatgaagaaatgaaacaagaagaagcacaactgaaagagcagcttttcctttatatggataagtttgaagaattccagactaccatggcaaaaaccaatgaactttttacagccttcaagcaggaaacggaaaagctgacaaagaaaattaaaaaactggaaaaagaaatggtaatatggtataccaaatgggaaaataataatacaacacttctgcaaatggctgaagagaaaactattcgtgataaaaattataaggtctttcaaataaaattggagcggttagagaagctgtacaaggctcttcaaatagaaaggaatgaactcagtgagaaactgggaattctgaaagggcaggtctctgtgaaagtagcagatgtagatttagcagtgcctgtgacgcattcctgtgctgacctggattcttccaatatgctgaacacttcctctaaaagagccccaggagtccatctggaggctgaccccaaaggaatgaatgaagtaaaatgctactcaaaagccctctccacaggatctcctctaggcattgattaagattaagtgtgatcattgtactgatggatatattttgtgtacatgtttctcttttagttgtaactattgattttgtaatgaaaatttcctctcctttttctaccatatctctgtttttttagaactactcaactgtgtggtaacagaaagcttcttaccaatttccccaactatgttgcacatcagcctcattttccccctttattggaatgcatgttttcattgccttctcctttcaaagtgtacgtttgtgtgttcatcaccttaaattatcttaatttgagacttttttataatggtttcgtaatgtgaaatcaaatactaatttaaactctggagcccataatatctacataaaagaaaatataaactgactaata

SEQ ID NO: 48301 - DNA, 1601 bp, Homo Sapiens
agaggcggtgcggcacagaggagcgctcgcttcacaaggtgaccctagctcccaccgccaccgccgcggtcgcggtccagaccgcgctccagcagctccgcgccctcccaggcacccggcctttctttctccctcttgcaaccaagatccgtccggccgctggagacccagggagccggggttaggaactcacttggggctttcccctcccccaccggagagccccgggatggagagccgaaaggacatggttgtgtttctggatgggggtcagcttggcactctggttggcaagagagtctcaaatttgtccgaagccgtgggcagcccgctgccggagccgcccgagaaaatggtgccccgtggttgcctgagccctcgggccgtccctccggccacccgggagcgcggcgggggaggcccggaggaggagccggtagatggactcgcaggcagcgcggcggggccgggcgccgagccccaggtagctggggcggccatgctcggcccaggacccccggccccctcagtcgacagcctctccggacaggggcaacccagtagctcggacaccgagtcggatttctatgaagaaatcgaggtgagctgcaccccggactgcgccaccgggaacgccgagtaccagcacagcaaagggtccggctccgaggcgctggtcggcagtccgaacggagggagcgagacccccaagagcaacggcggcagtggtgggggcggctcgcaaggcaccctggcgtgcagcgccagtgaccagatgcgtcgttaccgcaccgccttcacccgagagcagattgcgcggctggagaaggaattctaccgggagaactacgtatccaggccgcggagatgtgagctggcggccgccctaaacctgccggaaaccaccatcaaggtgtggttccagaaccggcgcatgaaggacaagcggcagcgcctggccatgacgtggccgcacccggcggaccccgccttctacacttacatgatgagccatgcggcggccgcgggcggcctgccctaccccttcccatcgcacctgcccctgccctactactcgccggtgggcctgggcgccgcatccgccgcctccgccgccgcctcgcccttcagcggctcgctgcgcccgctcgacacgttccgcgtgctgtcgcagccctacccgcggcccgaactgctgtgcgccttccgccacccgccgctctaccccgggcccgcgcacggactgggcgcctctgccggcggcccctgctcctgcctcgcctgtcacagcggcccggccaacgggctggcgccccgggctgccgccgcctcggacttcacctgtgcctccacctcccgctcggactccttcctcaccttcgcgccctcggtgctcagcaaggcctcctccgtcgcgctggaccagagggaggaggtgcccctcactagataaggggccgccggctggctgccggctccatgacgcccgtggggtcaccccccggccccgggactcagccagcctcgctcctcgctcctcgctcctcgcccctaggacgccaagggggaaaggagagggcggaaaaggaccagcgggatcc

SEQ ID NO: 48302 - DNA, 489 bp, Homo Sapiens
atggggaaattgagggtgtcggggaaggaacggctatcacccaacctcacacgctttaagaagggaggtttcggtgtccagcccgaggagtcggaggagcccgacagggatcgggatcggcaaggggttcgtggcgcggccggtggacgctcagtagttgaactggcgctggcacggctggtagatgaagctgctctggttcttggaccggcgcggacggctctcgcgggctcggttctgccgctgcaccgccttggcgctcagcgcgtggcgctctgcccgctgccgggcccgctgcagccgccgcacctggcccgccttctccagcagcgccgcccgcgctgggagaggagcggcgtggcgcgcggcccgcggctcgcggcgggcgggcgtcaattccctgctccgcccccggcccgctcacccttcgctgaggtcgccgtcaggcagggccgcgtccgggagcggggaaggggacccgggctctag

SEQ ID NO: 48303 - DNA, 1336 bp, Homo Sapiens
agtaaaatggaacctttaaatatagatccctgtatcttaggaattagaaaggcagcaaaggcagttcctaatgagatggagaaaatgttgatttagtcatgcccttgtactgtgggggccatactgtctgttgacagagcatattaaaagacgttccctacattcgtcagccttagctaattggcagtctggtatttatgattttatattttatcagcttgggagctgcagtaccccccagcctcctagaacttggcttcccctgggaggcctcgttccaggagtcgttgttgagagtcaagccagggaagtgtgtttttgtcagggagcagccagtcctgtgctgggagcatcagggggcacctgccgttgaattgttctcacttgtgtgtaagaatccaagtatgtcacccttacaccaagtgcacacagtgacacaatcccctttcaatgtagataacattgcttcagagctggagaacttcatggggctcatcgaggtggtgacgggccgtgaagatccgccattctcatgccttggtctccttgtccttcctaaaaaaccttcgcctcatcctaggagaggagcagctagaagggtaagtgccaaatttcatgagctgacgttctattacaaaataagcagcgtgcttatgaaactgtgttgcaagagccctccctgccttgttaaagagaagaaaggaggaagccgcagtattgcctgtgctgctcgagtaggtcttgggtggagtcatggttctccattcttaggaggttgctgtttggaaaacagagatgttatcacccttactggattttgcctcatcagtcaagggttgtgtctgactgtgaccagtgagacggcagacgggggtgcgcttagggcttttctgccaagaatgacagcagttggtctggagtgctcacctccctgtgaaatcattgttcgcgcgaccctcatctgcctcaggatgctgtacctacgcacaactgctccattaagatattgggagagcacgggaggagcatgggcggttcgttttgttagaaagaaacccggattcacgagatggtttttattgattagtttacaggatttgcactattgatagagtttttgccttggcacaggcctgctttgtgataggggttttaaaataaccgtgggcttttcactggaggataaaagccggtgcttattgcatgcacaattgctttccagccgtcagcctgtgtgtacctttgcatatgtacttttctctttaaactctcccttttaaatacgactcttgccaggctttaagtgaatgcttcaaaataaaaggagttatcaatt

SEQ ID NO: 48304 - DNA, 1584 bp, Homo Sapiens
ccatacgccagtcagcaggagcagcagcataatccagcatgttgggctgcccttagcgccaggcacacacagcgcaccaacaagtctaccacagtctgacctaagccagtttcaaactcagacccagcctttagtcgggcaagtcgacgatactagaagaaaatcagaacccctacctcaaccaccactttctctcattgctgaaaataagcctgttgtgaagccgcctgttgcagattccctggcaaacccccttcagttaacacctatgaacagtctggccacctctgtattcagcatagctattcctgttgatggtgatgaagacagtgcatctgggggaggtgttgtagccattgacaacaaaatagaacaagcaatggatctggtgaaaagccatttgatgtatgcagtaagagaagaagtggaagttttaaaggaacaaataaaagaattagttgaaagaaactctttacttgaacgagaaaatgcactgttaaaatctctttcaagcaatgatcaattatcccaactcccaacccaacaggccaatcctggtagcacttctcaacagcaagcagtgatagcacagcctccgcagccaacgcaacctccacagcagccgaatgtctcctcagcataaagctttcttaagcctcattaagaaaaaaactgaaagcaatctatccttgtgtgccactggtgttctttccactttatacgaaagcaagtagccatgctttggttgtgtgtttggccttttcagtattagacaatcattctacaagagcttttcctctctctgagatgtcatgcagcgctgttgatgtccagttctatgtcatcagtacacaaggagaataatagatggggtttattaaagcgagcaaagtctgcattttacctggtgcgcatgagtggggtctttaagagttttggtggctctcccatgtttcctattacccatggatttaccctgagccttcctatcacattataaataacagttcatctaaagagccacttttctttctgattcagtaacatttgcctacataagttttcatttatttgtgttttatttattacagggctgctattttcataatgtacatgaacaatgtcacagaacttttttaatttttttgaataattataagtatcagtaaaggaagtgaaagacaggattgcatttaatagataaaacgtttaggcaataattgaacaaaagaatcctggcatatttctaacactaatggcaatttacttatggtatttattttcagtagtaaagacccagcttgaatgtaaattttgtatagtgtaagtatgaagaacatagtgcaactgtacaggtagtcaccagttattgtgatatgataaataattgggctattttgatgaagaaaactttgttcatttgtttctactttctaagagaaattgccacgattcctctgcttttcaacatttcgtatgacttttttttcgggtgggaataaaaagctgtgaaattgttcaacctactttgtaaccaaagaagcaaagctgtgtaatggagtttggtttttttttgttgttttt

SEQ ID NO: 48305 - DNA, 515 bp, Homo Sapiens
attcttcccctctctacaaccctctctcctcagcgcttcttctttcttggtttgatcctgactgctgtcatggcgtgccctctggagaaggccctggatgtgatggtgtccaccttccacaagtactcgggcaaagagggtgacaagttcaagctcaacaagtcagaactaaaggagctgctgacccgggagctgcccagcttcttggggaaaaggacagatgaagctgctttccagaagctgatgagcaacttggacagcaacagggacaacgaggtggacttccaagagtactgtgtcttcctgtcctgcatcgccatgatgtgtaacgaattctttgaaggcttcccagataagcagcccaggaagaaatgaaaactcctctgatgtggttggggggtctgccagctggggccctccctgtcgccagtgggcacttttttttttccaccctggctccttcagacacgtgcttgatgctgagcaagttcaataaagattcttggaagttttga

SEQ ID NO: 48306 - DNA, 228 bp, Homo Sapiens
tttcagaagaaatggtaccagctcctctttatgcctctggtaggattcagctgtgaatccatcgggtcctggacttttttggttggtaggctaataattgctacctcaatttcagaacttgttattggtctattcagggattcaacttcttcctggtttagtcttgggagggtgtatgtgtccaggaacttacccatttcttctagattctttagtttatttgcatag

SEQ ID NO: 48307 - DNA, 1080 bp, Homo Sapiens
atgcaggtcccgaacagcaccggcccggacaacgcgacgctgcagatgctgcggaacccggcgatcgcggtggccctgcccgtggtgtactcgctggtggcggcggtcagcatcccgggcaacctcttctctctgtgggtgctgtgccggcgcatggggcccagatccccgtcggtcatcttcatgatcaacctgagcgtcacggacctgatgctggccagcgtgttgcctttccaaatctactaccattgcaaccgccaccactgggtattcggggtgctgctttgcaacgtggtgaccgtggccttttacgcaaacatgtattccagcatcctcaccatgacctgtatcagcgtggagcgcttcctgggggtcctgtacccgctcagctccaagcgctggcgccgccgtcgttacgcggtggccgcgtgtgcagggacctggctgctgctcctgaccgccctgtccccgctggcgcgcaccgatctcacctacccggtgcacgccctgggcatcatcacctgcttcgacgtcctcaagtggacgatgctccccagcgtggccatgtgggccgtgttcctcttcaccatcttcatcctgctgttcctcatcccgttcgtgatcaccgtggcttgttacacggccaccatcctcaagctgttgcgcacggaggaggcgcacggccgggagcagcggaggcgcgcggtgggcctggccgcggtggtcttgctggcctttgtcacctgcttcgcccccaacaacttcgtgctcctggcgcacatcgtgagccgcctgttctacggcaagagctactaccacgtgtacaagctcacgctgtgtctcagctgcctcaacaactgtctggacccgtttgtttattactttgcgtcccgggaattccagctgcgcctgcgggaatatttgggctgccgccgggtgcccagagacaccctggacacgcgccgcgagagcctcttctccgccaggaccacgtccgtgcgctccgaggccggtgcgcaccctgaagggatggagggagccaccaggcccggcctccagaggcaggagagtgtgttctga

SEQ ID NO: 48308 - DNA, 228 bp, Homo Sapiens
gtggactccaaaggaaaagaaccttgtaaatatgatggcataccccctaaaacacaggattctgtttattatgccaaagaagaaaagaagaaaacattggcagaacctttagtccaaaggggtgcagaaggtgacgtgtataaagcaccgactcctagcaaggaaacccaaggggcgctggacgtcaaagaggagcacaatgtgcagctggaggtgcctgtggaccag

SEQ ID NO: 48309 - DNA, 969 bp, Homo Sapiens
atggatccaaccgtcccagtcttcggtacaaaactgacaccaatcaacggacgtgaggagactccttgctacaatcagaccctgagcttcacggtgctgacgtgcatcatttcccttgtcggactgacaggaaacgcggttgtgctctggctcctgggctaccgcatgcgcaggaacgctgtctccatctacatcctcaacctggccgcagcagacttcctcttcctcagcttccagattatacgtttgccattacgcctcatcaatatcagccatctcatccgcaaaatcctcgtttctgtgatgacctttccctactttacaggcctgagtatgctgagcgccatcagcaccgagcgctgcctgtctgttctgtggcccatctggtaccgctgccgccgccccacacacctgtcagcggtcgtgtgtgtcctgctctggggcctgtccctgctgtttagtatgctggagtggaggttctgtgacttcctgtttagtggtgctgattctagttggtgtgaaacgtcagatttcatcccagtcgcgtggctgatttttttatgtgtggttctctgtgtttccagcctggtcctgctggtcaggatcctctgtggatcccggaagatgccgctgaccaggctgtacgtgaccatcctgctcacagtgctggtcttcctcctctgcggcctgcccttcggcattctgggggccctaatttacaggatgcacctgaatttggaagtcttatattgtcatgtttatctggtttgcatgtccctgtcctctctaaacagtagtgccaaccccatcatttacttcttcgtgggctcctttaggcagcgtcaaaataggcagaacctgaagctggttctccagagggctctgcaggacaagcctgaggtggataaaggtgaagggcagcttcctgaggaaagcctggagctgtcgggaagcagattggggccatga

SEQ ID NO: 48310 - DNA, 2244 bp, Homo Sapiens
gttgctggggctcggttgttgtagtcgcgatgttcttctccgaggccagagccaggtcgcggacgtgggaagccagtccctcggaacacaggaagtgggtggaagtatttaaagcatgtgatgaagatcacaaaggatatctcagcagagaggactttaaaactgctgttgtaatgctgtttgggtacaagccctccaagatagaagtggattctgtgatgtcttcaataaatccaaatacttctggtatattactcgaggggtttttaaatattgtcaggaaaaagaaggaagctcaacgatatcggaacgaagtaagacacatcttcacagcctttgacacctactatcgtggatttttaactttggaagatttcaaaaaagcatttaggcaggtggctcccaaattaccggaaaggactgttcttgaggtattcagggaagtagatcgagattcagatggtcacgtcagctttagagactttgaatatgccctgaactatggacagaaggaagcctaactattgtgaactacttttggtaactctggggagatcaatagattgtaatgtcagcagactcgactctactaatgatgtcatgctacagacttgtgattaaacatttaaaaatttttaatttttgtgggtacatagtaggtgcatatgtatacatacacacacatatatgggttacgggagatattttggcacaggcatgcaataagtaattgactaaatttttaatcataatttttggatgctgatgatagacttgcatctcagaatcctagagatggttgctgccgggggtctccttctgtgtggccagcagccctgagtcaggccgccattgctagagctggggctagggatggcactggtggtcctcctcctcctcactcttcttgccccctaccctctccacactgcaggccacggtgctctactcactcacttcattgtcctcaccatcccaccctgaatctcatcatctcctaatatctgcagaggggcagacttttcctgccaatggtgccagtttccttcatttgctcaacattggttgaacaaataatagcacctacacatacagaatacttactatgttccaagcaatcagccaggccttgggaagcataggcttaagacttctctaagataggctcatgcctacaatcccagcactttgggaggccaaagcaggaggatcacttgagcctaggaattggagactagcctgggcaacataccgagaccccatccctaccaaaaaattaataataaaaaattatctggatttagtggtgtgtacctgtagtcccagctacttgggaggctgaggtggaaggatcatttgagcccaggggtttgaagcttcagtgagccatgattgcactgtcgcactccagcctggatgatagagcaagaccctgtctctaaaaaaacactttcaattaaaaaaaaacatataaagacttctctaagataatgtccctgagtccaaatcatcactgtaaagtggtcccagggcactgtctgtgcaagacaaagaaatcggcttgggctaacatgagcaagccctctcgggctatatacagaggaagaacagggtgatgagggtactgggggcaagagacatgtttgcagaaccctttaggatggtctaggcttgggagtctcactgtggagaagcaagccttgagctgctcagctgccctctgctccataccccctggtttctagcagtcacgtcctgcacccagacacttagccatgtgtgttcacgttccccatgccttgcctgtcctgctgggctccagtaactgctatactggagcaagaacagcaatgctggacactcagcatttagtgaaggtaattccaaaatactggtatcagtactcttatttataagtgtacggaatgcataacatgaacattagtcaaagaacttttaatataattcactttttaagtgttaaaatttaaaggtcaagtaaaattgtaaatttgtaatatggaaacattaagcgtcattatcatacaaattattagcagataaccttaataaaaataaacgtttgcgggttttttttgagacagagtctcactttgtcacctaagctggagtacagtgcgcgatctcggctcactgcaacttccgcctcctgggatcaagtgattctcctgccttagcctcctgagtatctgggtttacaggtgtgtaccgccacacccggct

SEQ ID NO: 48311 - DNA, 1257 bp, Homo Sapiens
aacttcaccactcgctccaccttctccaccaactactggtccctgggcccagctacaggctctccaattagcagcgcggctagcctctatgcaggcgggggctctggttcccggatgtccgtgtcccactccaccagcctccgggacggcataagttccgggggcctggcggggatggccaggggtctgggaggaatgggaggcatccagaacaagaaggaaaccacgcaaagcctgaatgacagcctggcggtcagagtaaggagtctggagactgagaaccggaagctcgaaagcaaaatccgggagcacttggagaagaagggaccccaggtcagagactggagccattacttcaagaccatcgaggacctgagggctcagatcttcgcaaatactgtggacaatgtccgcatctttctgcagatcgacaatgcccgtcttgctgctgatgactttagagtcaagtatgagacagagctggccatgcgccagtctgtggagagcgacatctatgggctccacaaggtcattgatgacaccaatgtcatcctgcagctggagacagagatcgaagctctcaaggaggagctgttcttcatgaagaagaaccacggagaggaagtaaaatgcctacaagcccagattgccagctctgggttgaccatggaggtagatgcccccaaatctcaggacctcgccaagatcacagcagacatctcgacccgatatgacgagctggctcggaagaaccgagaagagctggacaagtactggtctcagccgattgaggagagcaccacagaggtcaccatgcagtccgccaaggttagagctgctgagatgacattcatggagctgagacgtacagtccagtccttggagatcgacctggacttgatgagaaatccgaaggccagcttggagaacagcctgagggaggtggaggcctgttatgccctgcagatggagcagctcaactcctggatcctgctgcacctggagtcagagctaacacagacccgggcagagggacagcaagcccagaagtacaaggccctgctgaacatcaagaacaagctggaggctgagatcgccacctactgcctcctgctggaagatggcaaggacttcaatcttggtgataccctggacagcagcaaccccatgcaaaccatccaaaagaccaccaccagccggatagtggatggcaaagtggtgtctgagaccaacgacaccaaagtttggagacattaa

SEQ ID NO: 48312 - DNA, 1503 bp, Homo Sapiens
gcgcttctgacaagcccgaaagtcatttccaatctcaagtggactttgttccaactattgggggcgtcgctccccctcttcatggtcgcgggcaaacttcctcctcggcgcctcttctaatggagccccacctgctcgggctgctcctcggcctcctgctcggtggcaccagggtcctcgctggctacccaatttggtggtccctggccctgggccagcagtacacatctctgggctcacagcccctgctctgcggctccatcccaggcctggtccccaagcaactgcgcttctgccgcaattacatcgagatcatgcccagcgtggccgagggcgtgaagctgggcatccaggagtgccagcaccagttccggggccgccgctggaactgcaccaccatagatgacagcctggccatctttgggcccgtcctcgacaaagccacccgcgagtcggccttcgttcacgccatcgcctcggccggcgtggccttcgccgtcacccgctcctgcgccgagggcacctccaccatttgcggctgtgactcgcatcataaggggccgcctggcgaaggctggaagtggggcggctgcagcgaggacgctgacttcggcgtgttagtgtccagggagttcgcggatgcgcgcgagaacaggccggacgcgcgctcggccatgaacaagcacaacaacgaggcgggccgcacgactatcctggaccacatgcacctcaaatgcaagtgccacgggctgtcgggcagctgtgaggtgaagacctgctggtgggcgcagcctgacttccgtgccatcggtgacttcctcaaggacaagtatgacagcgcctcggagatggtagtagagaagcaccgtgagtcccgaggctgggtggagaccctccgggccaagtactcgctcttcaagccacccacggagagggacctggtctactacgagaactcccccaacttttgtgagcccaacccagagacgggttcctttggcacaagggaccggacttgcaatgtcacctcccacggcatcgatggctgcgatctgctctgctgtggccggggccacaacacgaggacggagaagcggaaggaaaaatgccactgcatcttccactggtgctgctacgtcagctgccaggagtgtattcgcatctacgacgtgcacacctgcaagtagggcaccagggcgctgggaaggggtgaagtgtgtggctgggcggattcagcgaagtctcatgggaagcaggacctagagccgggcacagccctcagcgtcagacagcaaggaactgtcaccagccgcacgcgtggtaaatgacccagacccaactcgcctgtggacggggaggctctccctctctctcatcttacatttctcaccctactctggatggtgtgtggtttttaaagaagggggctttctttttagttctctagggtctgataggaacagacctgaggcttatctttgcacatgttaaagaaaataaaaa

SEQ ID NO: 48313 - DNA, 519 bp, Homo Sapiens
atgggtctgctgtcccagccctgccgttcagtctacatcttcgccaagaatggcatccccttcgagcttcgcacagtggagctgaccaaaggccagcagcacagcgatgcctttgcccaggtgaaccccctgaggaaggtgccgttgaaggatggggacttcaccttggctgagagtgtggctagcttgctctatatgagctgcatgtacaaagcacctgaccactggtacctccaggacctgcaggcccgcgcccatggggatcagtacctgtcatggcagcacatggccctgcagagtagctgctgctgggccatgtggcagacgataataatccctgtgttcctgggcgagtcagtgccacccgagatgttggcggccactttggctgagctggacggatgcctgcagctgctcgaggacaagttcctgcgggaccaggccttccttactgggccccgtatctctgtggctggcttggtggcaatcacggagctgaggcatgagagtgccatgggg

SEQ ID NO: 48314 - DNA, 2979 bp, Homo Sapiens
tacgccacagcccagcggcggccattcgcggaaaaagaggcagagcctgtgccagctacagcctcctccgagccaccgcgggcgggcgggaccggcctctcctcccgcctcgcccccacccccacccacctctatcccagtgtctccgtctgagggtttgtcctgttaatgcgggatgagcgatcagaagaaggaggaggaggaggaggcggcagcggcagcggcgatggctacagaaggagggaaaacctctgagccagagaataacaataaaaaacccaaaacctcaggctcccaggactctcagccctctcctctggctttactggcagctacttgcagcaaaatagggactcctggtgaaaatcaagcaactggacaacaacaaattattatagatccaagtcaaggattggtgcaacttcaaaatcaaccacaacagctagaactggtaacaacgcaacttgctggaaacgcttggcaacttgttgcctccactcctcctgcttcaaaagagaataacgtttctcaaccagcctctagttcgtctagttcttccagcagtaataacgggagtgcatctcctacaaaaactaaatcaggtaattcttccacccctggtcaatttcaagtcatacaagtacaaaatccaagtggtagtgtacagtaccaagtaattccacaacttcagacagtggaaggtcaacaaattcaaatcaatccaactagtagttcatctctacaggatttgcagggtcaaattcagctcatttctgcaggtaataatcaagctatactcacagctgctaacaggacagcttctgggaatattcttgctcaaaacctggcaaatcagacagttccggtccaaattagacctggtgtttcaataccactgcagttacagactcttcctggtactcaggctcaagttgtaacaaccctaccaattaacattggaggagtgactctagctttgccagtgataaacaacgtggctgccggaggagggactgggcaggttggccagcctgctgctactgctgatagtgggacttccaatgggaatcaattagtttccacacccaccaacaccactacttctgccagtactatgccagaatctccctcctcctccactacctgcacaaccactgcttcaacgtctttgacaagcagtgacacattagtgagctcagcagatactggccagtatgcaagcacatcagccagtagttctgaacgcaccattgaagaatctcaaacacctgctgctactgagtctgaagcccagagctccagtcagcttcagcctaatggaatgcagaatgcacaggatcaatcaaattctcttcagcaggtgcaaattgtaggccaacctatcttacagcagatccagatccaacagcctcagcaacagatcattcaggctattccaccacagtcgtttcaactccagtcagggcagacgattcagaccatccagcagcagcctttacagaatgttcaacttcaagcagtaaatccgactcaggtgcttatcagggctccaactttaacaccttcagggcaaatcagttggcaaactgtacaggttcagaatattcagagtctttcaaatttgcaagttcagaatgctgggttatcccaacaattaaccatcaccccagtgtcttcaagtggtggcacaactcttgctcagattgctcctgtggctgttgctggtgccccaataactttgaatactgcccagcttgcatcagtgcctaaccttcagacagtgagcgttgccaacctgggtgctgcaggtgttcaagtgcagggagttcccgttacaatcactagtgttgcaggtcagcagcaaggacaagatggagtaaaagtccagcaagctactatagctcctgtaactgtagcagttggaggaattgctaatgccacgataggtgctgttagtcctgaccaactcacacaagtgcatttgcagcaaggccagcagacttctgatcaagaggtacaacctggcaagaggcttcgaagagttgcctgttcctgtcctaattgtagggaaggagaaggaagaggcagtaatgaaccaggaaaaaagaagcagcatatctgtcatattgaaggatgtggtaaagtttatggcaaaacatctcatttacgagcacatcttcgctggcatactggagaaagaccttttatatgcaactggatgttttgtggcaaaagattcacacggagtgatgagctccagagacatagaagaacccatacaggtgaaaagagatttgaatgcccggaatgttctaaaaggtttatgcggagtgatcatctctccaaacatgtcaaaacgcaccagaataaaaaaggtggtgggacagctcttgccattgttacctcgggagaactggactcatctgttacagaggtgcttggctccccaagaattgtcacagttgcagccatttctcaagattcgaatccagcaactcccaatgtttcaaccaacatggaagaattctgaaaagttatttataacagagacctctagtgctgcacttgtttacacacctttgaaaatctggaaatgggctggtcaagtggattacagagtaggaaattatgttttcattcttggcttctttaagtattccagggtttggggtcaacacgtgaagtgttgaattttaaaaaatacaaaaagcagactgatgtactggaaacagaaaagtatttcctccatactataagttgtagttgtttggaaatatatcacataacctttatacagaatcttcccatctcttaatatcatgtgttaacatgtttaaaaagaccttagtagtttgcaggctggaccttaattggacttattttctttgaaagtactttgttataaattcagtcagtaataatttacgtgtattctttttctctatagcacagaaaacagatagttaactgatgataggg

SEQ ID NO: 48315 - DNA, 423 bp, Homo Sapiens
ctgtttgcagacaagttcccaaagacagcagaaaattttcgtgctctgagcactggagagaaaggatttagttataagggttcctgctttcacagaattattccagggtttatgtatcagggtcgtgacttcacacgccataatggcactggtggcaagtccatctatggggagaaatttgaagatgagaacttcatcctaaagcatacaggtcctggcatcttgtccatggcaaatgctggacccaacacaaatggttcccagtttttcatctgcactgccaagactgagtggttggatggcaagcatgtggtctttggcaaagtgaaagaaggcatgaatattatggaggccatggagcgctttgggtccaggaatggcaagaccagcaagaagatcaccattgctgactgtggacaactc

SEQ ID NO: 48316 - DNA, 1240 bp, Homo Sapiens
accgtgcactcgccagacatataccgcgtggtggtggagggtgagcggggcaaccggccccacatctactgtctggagcagttgctgcaggaggcgatcatcgatgtgaggccagcctccactcgcttcttgccacaagggaccaggattgcagcctactggagccagcagtaccgctgtctctacccaggcactgtggtccgagggttactggacctggaggacgatggggacttgatcaccgtggagtttgacgacggagacacgggcaggatccccctctcacatatccgcctcctgccccctgactataagatacagtgtgctgagccgtccccggcccttctggtgccaagtgccaagcgccgcagccggaagaccagcaaagacactggggagggcaaagatggtggcacggctgggtcggaggagccaggagccaaggcccgtgggcgtgggcggaaacccagcgccaaggccaagggtgacagagccgctaccctggaggaggggaacccaacagacgaggtccccagtacccccttagccctggagccgagcagcaccccaggttccaagaagagccccccagagcctgtggacaagcgagccaaggcccccaaggcgcgcccggcaccgccgcagcccagtcccgcaccacccgccttcaccagctgcccagcacccgagccatttgcagagctgccagctcctgccacctccctggccccagcacccctcatcaccatgcctgccacacgccccaagcccaagaaggcgcgggcagccgaggagtcgggtgccaagggccctcggaggccgggggaggaggccgagctgcttgtcaaactggaccacgagggtgtcacgtcacccaaaagcaagaaggctaaagaggccctgctgctccgggaggatccgggggcggggggctggcaggagcccaagagcctcctgagcctgggcagctatccccccgcggccggcagcagcgagcccaaggcaccctggcccaaggccaccgacggggacctcgcccaggagcccgggccggggctcacgttcgaggactctgggaaccccaagagcccagacaaggcccaggctgagcaggacggggccgaagagtccgagagcagcagcagcagcagtagtggcagcagtagcagcagcagcagcagcagcagcagcggctcggagacagaaggggaggaggaaggcgacaagaacggggacgggg

SEQ ID NO: 48317 - DNA, 1059 bp, Homo Sapiens
caagatggcggcccccgggagctgtgctctatggagctattgcggccgtgggtggtcgcgggcgatgcggggctgccagctcctcgggcttcgtagctcttggcccggggacctactaagtgctcggctcttgtcccaagagaagcgggcagcggaaacgcactttgggtttgagactgtgtcggaagaggagaaggggggcaaagtctatcaggtgtttgaaagtgtggctaagaagtatgatgtgatgaatgatatgatgagtcttggtatccatcgtgtttggaaggatttgctgctctggaagatgcacccgcttcctgggacccagctgcttgatgttgctggaggcacagattccttgggcgggtctcgtgtcgtggtgtgtgacatcaacaaggagatgctaaaggttggaaagcagaaagccttggctcaaggatacagagctggaagagttcaaggacatgatagaagatgcaggctttcacaaggtgacttacgaaagtctaacatcaggcattgtggccattcattctggcttcaaactttaattcctttcctatcatggagcatgaaccagtcatatcctgttgaaagcctggaactgaaggataatctggcaaatgagacagcagcagagcatctcctcttaaggatacgtgccttggactcatgtttgaatcgaacagtctcaaagtggaagaacaaattcttgtcacttttttacagctttctttggagctgcttcagtccatctcccagaggcatttggtctgtatctttgctcaactgctaatttctcttggctgtagggtgtgtggttaaggtacaaccacccctaaagctcagttttgaagtgagtgtatttatagcttctctgctggtgctgccttctagagggatgatagatcatttgaacccaatgacaatttttaaccagaaaatttaattgtacctgaatcaacctttcagcctaggacgaagtctaggcccaagtcagagtattaatgatcatgagaattgtgtgctgaaccagtaaacgagtttaccttttga

SEQ ID NO: 48318 - DNA, 1470 bp, Homo Sapiens
actcaatgtcggaacgttccgaagatgacgtcggagcgttctcgaatcccgtgtctctcggctgctgctgccgaaggaacagggaaaaagcaacaagaaggaagagcaatggcgacactggatcgcaaagtgcccagtccggaggcgtttctgggcaaaccctggtcctcctggatcgacgccgccaaattacactgctccgacaatgtagatttagaagaggctggaaaagagggtggaaaaagcagggaggttatgaggcttaataaagaagatatgcacttatttggccattacccagcacatgacgacttctatctcgtagtgtgcagtgcctgtaaccaggtcgtcaagccacaggttttccagtcgcactgcgggagaaagcaagacaacaggagaaatgaaggcatctccaggagtggaccagagagcagccaagccatagagaagcatcaggtgtgagaatggaaaacgcagaagagacgtacaacttctgaaagatctcagaggactggcattgtctggagacggcttcctggaagaggagactccagcagagccctgaagtgtggacaagcttccattcactgcaaattcgtgagcacactctggtgtcaggatctagtaaggaaatgggcttgagcagagcagggggtacctgtggggttcttctcttcattttcaccaccacaaagctggtctaagctgccatcaattcccacctggacaactgcaaaagccttccagctgttcctgcttccactcttgctcctctacaattcattctgcacgcagaagtcagaatcaaaatcaaagttcatcatgtcattctcttgacttgtggcttccctttgctcttaagctaaaagtaaaaatcattatcatggctacaaagtcttgtgtggtctgggccacatcctgtgccaggctccctttcattgtctatattccagtcaagctggccttcaaaatttcagcacattgggtctttctgccacaggcccttgcacatacatgcttttccctctgtacatgtgattttctttcatccccgctttccaaagctaactctgactcatccttcagactgcatcttaatgattacttccttctggaagactcccctaattttcacaactagatgagctctcccttatatgttgaaaacaagtatttcttgtgtgaacagaaatgtttaatgtctgccttcccaactcagccacaagctctgtgaggatggggactcagtctttgcatccctcagagcctaacatagtctcagttaatacgtgatagctggagcgtgacatttcattaggaacagtgaggctagttgagaaattatacctcaccagtatataggagagtaccattaggaattcttaatgggatgaaaacctgaattcatgtctagaccctgccacctgctggctgtgctgttttaaataaattgcagatcctctcaga

SEQ ID NO: 48319 - DNA, 2002 bp, Homo Sapiens
agagtccagggagagtgcgcgggcggccgccggctgaatgaagcctgggacgcgggagccgcgccgcgcgcagtgtctgcagtgccggaggtctgggaggctccgggcgaagcctccctgctgcaggttatgatgatgtcagacaatgctaaaggcagagcagctcattcatggaagaaaagagggagtatttcttctctaagtaatcatgaattttggcgaaaggaaattcatgggcgcatcaaagattctatgagtactgtgtcttatatggaagaacccagtcagcgtgatgatatctctcgccttacagttcagatggaaaacacctatcagttgggtcctcccaaacattttcctgtggtcaccgtcaatcatattttgaaagatgtagtaaccagctatctacaagtagaagaatatgaaccagagctctgtagacagatgactaaaaccatttctgaggttattaaagcccaggtcaaggacttgatgattccacggtataaactaattgtgattgttcacattggacaactgaacaggcagagcatacttattggaagcagatgcctctgggatcctaaaagtgataccttttcatcttatgttttcagaaattcttctctcttcgctcttgcaaatgtctatgcagtttaccttgagtgattgaaaataagaaatctagctcttacttttgaaaattctgaggcaggctgtatgtctgtacacaaaagttttactgccaaaaactttgagaaagaaacaacactgatatttcaagcaactggaagcttttgaattttttcatattctagtaaagatttggggaggggagggtagccacagaaagaatcttgtttatctaaagcaggaacttgatcttggttttgctggattgctttccatagacatagattcttattaaatatttgttttggtactaattattttaattattctttaattagagtgttacaatttcctgcattgttttttaataaaaagaagctttagaaaaactatggctatataccctgaccaataaatgatagtagaatattcaacatggtatacacaaatgataaataatgtgcctcagtgctgcatataaaagaatactggttttcattttgtacttaataaattgagcagcattcattaagtgcaattattgttacatgtacctgacagttgaaactgctgaggtagaattaatggcttcataacaattatcgtggtcccacgggctgcaagctaaaactagaagctcttgtggcttgcctgcactttacacaattgtgggagaaccgaaagttggctcttcagtaatggaaactataaagtgaataaaggctttttgggacactgaagtagacattgtgatattaaatatacatgatgcttaatactaaatgtgtctgtaacacataaaatcatttattggaaagagacattgcttttaaatatcctaggctaacaaactttttcacaaaatatatggctggcaccttaacaaataaagcatgtgtagttaccattttactcctatgaatttaatactaaagtgacccagtgaggtttttgaatagacgggtgctaaaatttacagggctgaaatagcttattattctgctggttaatgtatcttacgccacggatcatttatttttatgaagctttcaagtctttgtgtgcaagtaaaatgatgttgtggcgttgttcttggatggtaagtggactgcctagaggacatttgttaaaggtcaaagacaaattgtacacatatggagaaaattagcaatgctgtagtcttaaggaaaaaatgatttatcattcatatcaaaaagagtttagcaaatggaaaaccagttaatgctttaattttaaaatgttttggtgtcttacttttccctaaaaatgacatgtagtaaaaaatggatacttttaaaatcccttcccttctgctattttctggcttttaaagtgattattcaaaatg

SEQ ID NO: 48320 - DNA, 438 bp, Homo Sapiens
atgtctatttttaaaattgactacaatcatgactgttcttcttgtcattctgtagcagctggatttattaccatctcttatttaaaggtccttcagaacacgttgaagcagttcatttcaggtcaatggctggtaagcaatgtcaggacctctggggaaggagaagctgacgggatcccagaggaaagaattgaggttgtttgctcccttgtagaaagcccacagatcccttcccagactagaaaaaaagtgccagagtgtcctgaaactttccttctaaggcacatacttcaaagagactggggattcctttgttttaaatataggtggggtctcacagtgttgcccaggctgggctcaagcgatcctgccacctgggcctcccaaagtgatgggattacaggcatgagccaccatgcacggccatggagattctaa

SEQ ID NO: 48321 - DNA, 1785 bp, Homo Sapiens
atgggaccggaggcgaggaggacgacgggccggcggcggagctgctggaaaagaaatctcagtgcttgtggaggttttgaagtttgtgatgacatggtgactaaggatatcatgacccctctggttgcgctgctaaaagagtgtagtgctggactggattcaaatgagatgtctctgcaggagaaaaaagatcagaacagaaattctattgagaacatagccaatgagactgtgaacgtgctgtggaatatatgtgaatgcagtagtagagcagtgtctatattcaacaaagaagggtgtttggagattgtgttaaagtatttaagtaggtttcctaccaatgttgacctggctatttcagtagcatattgtttgcagacagtgactgaggataacccagagctgctgaagtctttcagtgctacagcattgaacatgctggaatcagcactgctttctcctgtcagttccatggaatctcttctattgaagacattggtagcaggcacaatttggaatctaaaggacattattccatgcaagagtcaagcagaaatcataaatgccttactaaagatcttatctgaagttttgggaatggatgctggtgaaatggttattcaaatgaaagaggctgaaacgcaaaggttaaaaactgctgcagaggctgaggaaatattagagaacactaatggggatgatttgattgaagatgatgaaatggaaggaatttctcataaaagaagagtcagaaggaaaactttcgtttcagatttacttccgcccactgacaaggaactgagagagactatagcattgctgacagcccaacagactgctctggaaattattgtcaacatgtgctgcaatgaagatccctctgatgacgaatgggaagagctttctagcagtgatgaaagtgacgcatttatggagaattccttcagtgagtgcgggggacagctgttttctcccctctgcctctcccatgaagttcacacggctctcaccaactacctcatcccaaagaagatttttgagaaaactgcctttccaaacagcattgcagttgacctatgttctaggaaccctacttggaaacctttgattagaaaaatgaacactattcagtgcagagccctcttctgtctccagagtcttgtgtccctcctggatgtggagcacctgggaggagccgcagcccttcagacgcttgcacagcatctgtcacagctgcttttttctcaaccagattttgctaaacatgttgactttctagaagccataagtagtgctttgagggcccttttgcaaacaatggcctccaagaacatttcccagtgcatgactcctgatcagctgatgacattatgcaaagcaggcattcatagtagtaatgtcggggttagagtgaatgtcgttagcattttaggaatcactggcagcgtccttgccaaagaagatggtacacttgaaactcttaagaacattgggtgctttctgcttgaagttaccaccaaagatccttcccttgtggtagcaggagaagctttggatgccctctttgatgtttttgcagatggtaaagaagccgaaagagcctcgattcaaattaaattattatctgctctgaaagaattccagccggtctttaaaatgaagatacgtaaagaagggagaggtaactatagcacagatcagctgtgtgttcttgacaatgtgaaaatgaatttgcgaagatttattgcttatcaagaaactgttgagaaaagactgacttcttaa

SEQ ID NO: 48322 - DNA, 2185 bp, Homo Sapiens
caggagtatcccgaggctgcacggggtaggggtggggggcggagggcgagtcttggtcttgagctgctggggcgcggattctctttcaaagccagaaccaggcctgtcccggacccgcgtcccggggaggctgcagcgcagagcagcggggctggggccggtggggggccgtttgggacgcgcggagaggtcctgagcgcggtggctctgcgtctcctagctctgatctccaggctacccctgtgattccgcgcagaggtacctctcggaggacgccggggtcccatgggcggcgccgcgcagggcgctaggaccccgcggggagcggaggcggcctcggcccgggagcctggaggacctggccggtcgatccgcccgggctggaaaactttctttataattacttctccaggtcggagcgcgcggcttgctaggcgcgcggggccggcgctgttacccggcgtggagtcgccgatttttttttgcgggaccgcggggccccccagactagcggagctggacgccggggcgagcacggggaggggcgcaccgagggaggagacaaacttaactctggggccgggattccgaggcgggggccgcagccctcgaggcccgaagccaccgcttcctcccccgcctccccattcaggtgggcgccaacggcgggagcgagggtgtccaggccgccgggctgccaggtccgagcacgcacagggagaactctgcccagtggttcgccgggcgctgtagtccccgggatcctagggaccgaggcggccaggccctggggccccttgagtgcggcagctaatgctctcaccgcggcgggggaaggagcttgccaccgagacccccagccacgtgcgtccctcgcattctttaccggggccggggtggcggctacggaccgtcagctgggcccagatggagtcttgggagccctcaagtgtctcctgtccttgcccgcgccgcccctcgccactggcgctgaggcctgacgccgcctgcgtcccggctagaggcgcgcttgcctacaggtgagggaagacccccttcaccgacagtggccttaggcctggcaaggcgccacgacccgcccaggagccccggagggggcacagctaaaaacaccgctggagagccccgagcttccacgacgatcgcagtaaagaagcagtttcatctgggcaacgcacactgcgctttaatcaagttcctattcaacatagtcccagtgattaatagcccaactgcttcgttttcggtccagagctcataaacaagatatttttagcttgacgcttttggacgggagggagtaaaaaccagatacgttaaataaatatcccgatgtgagccggagagctgcttgctgagccaaatgcaggacccattcatatagcattcacctgtggagggagacctggacggaaatcaaaaagcaccaagagcgatttgcgtttttttctgcggtgctaaaactaatggcttttcctacctaggaacaaagaaacgccactgtacatgcacggttcccggcctgtggagttgtgggaggaaggcgatgtctggccttttttgcacagctgctgttgcctgcccagagatcgggaactctgccccgtaggactggaagaaacctcagtaatgggaataagactttgtccaatagggggctgatgaatgtgtgggggcgacaatggcaaggagtgggactcccggcccggggttcgccaaccccaggggccacaggtcctcctacaattgaaccagaattcacccacccgggcctgccctgtgcagggtgccgagagcccagggatgcatgagagggtggctcctgcctctgggaactgggacagtgggagagacggataagttgtcacacagaggctgctgggaggaaggaggagacagaaggagtaggggatgggacttcattcattcatcaaatgcacacgaggcacaaatgggaatcaagggtggatgtgctgtgatgaagagaagtcctgccctgaacaaggtggcgctgtggaggaggcagagatcagatttgtctgcggaggtgttatggactgaactgtgtccctgccccaaattcctatgttgaaggcctaacccccatgtgactgtatttggagataaggcttttaggaagtcattaaagtgagatgatgtcata

SEQ ID NO: 48323 - DNA, 690 bp, Homo Sapiens
tacttccagaccatccagaacctgaggattcagatcttcgcaaatactgtggacaatgcctgcatagttctgcagattgacaatgcccgtcttgccgctgatgactttagagtcaagtatgagacagagctggccatgcgccagtctgtggagaacgacatccacgggctccgcaatgtcattgatgacactgtcactcggctgcagctggagacagagatcgaggctgtcaaggaggagctgctcttcatgaagaagaaccacaaagaggaagcaaaaagcctacaagcccagattgccagctctgggttgatggtggaggtagatgcccccaaatctcaggacctcgccaaggtcatggcagacatccgggcccaatatgacgagctggctcagaagaacggagaggagctggacaagcattggcctcagcagattgaagagagcaccacagtggtcaccactcagtccgccgaggttggagctgctgagacgacgctcacggagctgagacgtacagtgcagttcttggaggacctggactccatgagaaatctgaaggccagcttggaaaagaacagcctgagggaggtggaggcccgctacgccctgcagatggagcagttcaatgggatcctgctgcacctggagtcagagctggcacagacccgggcagagggacagcgccag

SEQ ID NO: 48324 - DNA, 774 bp, Homo Sapiens
cttctttttcaagctggtattggactcagagccaacaacttcctcctattcttccaaatcttctcactccttcaggatcacaggcctaagcccactgaccccatcacctgtcacctggcccttgtccacttagggatgctcctcattgtggtcttcttggcatctccagacctgtttgagtcactgtattttcagaatgacttcaagtgtaaggcattcttctgcatgcacagggtgatgaggagcctctccatctgcaccacctgcctcctgagcatgctccaggctgtcgccatcagccctggcacctcctggtctgcaaggattaaacagaaattcaaaggttacatctttcactccttcttcttcctatgggttctcagtttgtctctcagtagtaacctgctctcctccactgtggcttcttctaatgggaccaagacggttgtgctaagtatcagtaaaactgatcactttataagctacattatcaggagcctgtctttcatgctgccactgcttacgaatgtcttctttgtagcaatcatgcagccctcaagtgcatacatggtaattctcttgttcaggcatcagagacaatcccaataccttcatagaaccaacctctctccaagagcctccccagagaaaaggaccatcttgttgctggtgagttgctttctggtcatgtactggggggaccttattatctcatcctcctcaactctattattggcttatgactcagtcattgtgagcatgcagaggcttctg

SEQ ID NO: 48325 - DNA, 1038 bp, Homo Sapiens
gcagttaacaacaaaaatcgagcaacgccacgtcgcacaaacaggacaggagggggcgaggggtgtgtgcgcgcgcgtgctgtccccaaatggatgagaaataagggaaaggaggggttggggaccgtgtgatgaagcaacatgctaggcccgggacaagtccggctccggcctcgggtctggagggacaaggccgggggccgggtggcagacggggcctctggtcttcccccagcgcgagggtcgtggcgcgaaacggggacagggcgcgcgctcggagcctcctccccgccccgccccgcccaagggtcttcctcccccgggattcagagcggcccctcctccaggccaggctcgccgcggggcgctgagcaggccgggacaccgcggccgaggttatcgttaggcatctcccaggcgaccggctccgcagcaagatggcggacgagaaggacagggaagggcctgggatacaacagtgatgagataaggcctcggactttactgatcgaacatctaatggaaggtggaagaagagaccatcacacaatgacggtgttatggggaacacaggagataatagtagcagaatttcacaaaaaaatcaaagaggcatttgaagtctttgaccatgagtcgaataatacagtggatgtgagagagattggaacaattatcaggtcattaggatgctgtcctacggaaggagagctgcatgatctgattgcagaggtagaggaagaagaacccactggatacattcgattcgaaaaatttcttccggtgatgacagaaatactactagaaagaaaatacagaccaattccagaagatgtccttcttcgagcttttgaggttttagattcagctaaacgtgggtttcttactaaggacgagctgatcaagtatatgactgaagaaggtgagcctttttctcaagaggaaatggaagaaatgttgtctgctgcaattgatccagaatcaaattcaattaattacaaggactatataacaatgatggtgatagatgaaaattaa

SEQ ID NO: 48326 - DNA, 2340 bp, Homo Sapiens
aatggctcagcagacaagcccggacactttaacagtacctgaagtggataatccgcattgtccaaacccgtggctgaacgaagaccttgtgaaatccttgcgagaaaacctgttgcagcatgagaagtccaagacagcgaggaaatcggtttctcccaagctctctccagtgatctctccgagaaattcccccaggcttctgcgcagaatgcttctcagcagcaacatccccaaacagcggcgtttcacggtggcacatacatgttttgatgtggacaatggcacatctgcgggacggagtcccttggatcccatgaccagcccaggatccgggctaattctccaagcaaattttgtccacagtcaacgacgggagtccttcctgtatcgatccgacagcgattatgacctctctccaaagtctatgtcccggaactcctccattgccagtgatatacacggagatgacttgattgtgactccatttgctcaggtcttggccagtctgcgaactgtacgaaacaactttgctgcattaactaatttgcaagatcgagcacctagcaaaagatcacccatgtgcaaccaaccatccatcaacaaagccaccataacagaggaggcctaccagaaactggccagcgagaccctggaggagctggactggtgtctggaccagctagagaccctacagaccaggcactccgtcagtgagatggcctccaacaagtttaaaaggatgcttaatcgggagctcacccatctctctgaaatgagtcggtctggaaatcaagtgtcagagtttatatcaaacacattcttagataagcaacatgaagtggaaattccttctccaactcagaaggaaaaggagaaaaagaaaagaccaatgtctcagatcagtggagtcaagaaattgatgcacagctctagtctgactaattcaagtatcccaaggtttggagttaaaactgaacaagaagatgtccttgccaaggaactagaagatgtgaacaaatggggtcttcatgttttcagaatagcagagttgtctggtaaccggcccttgactgttatcatgcacaccatttttcaggaacgggatttattaaaaacatttaaaattccagtagatactttaattacatatcttatgactctcgaagaccattaccatgctgatgtggcctatcacaacaatatccatgctgcagatgttgtccagtctactcatgtgctattatctacacctgctttggaggctgtgtttacagatttggagattcttgcagcaatttttgccagtgcaatacatgatgtagatcatcctggtgtgtccaatcaatttctgatcaatacaaactctgaacttgccttgatgtacaatgattcctcagtcttagagaaccatcatttggctgtgggctttaaattgcttcaggaagaaaactgtgacattttccagaatttgaccaaaaaacaaagacaatctttaaggaaaatggtcattgacatcgtacttgcaacagatatgtcaaaacacatgaatctactggctgatttgaagactatggttgaaactaagaaagtgacaagctctggagttcttcttcttgataattattccgataggattcaggttcttcagaatatggtgcactgtgcagatctgagcaacccaacaaagcctctccagctgtaccgccagtggacggaccggataatggaggagttcttccgccaaggagaccgagagagggaacgtggcatggagataagccccatgtgtgacaagcacaatgcttccgtggaaaaatcacaggtgggcttcatagactatattgttcatcccctctgggagacatgggcagacctcgtccaccctgacgcccaggatattttggacactttggaggacaatcgtgaatggtaccagagcacaatccctcagagcccctctcctgcacctgatgacccagaggagggccggcagggtcaaactgagaaattccagtttgaactaactttagaggaagatggtgagtcagacacggaaaaggacagtggcagtcaagtggaagaagacactagctgcagtgactccaagactctttgtactcaagactcagagtctactgaaattccccttgatgaacaggttgaagaggaggcagtaggggaagaagaggaaagccagcctgaagcctgtgtcatagatgatcgttctcctgacacgtaacagtgcaaaaactttcatgccttttttttttttaagtagaaaaattgtttccaaagtgcatgtcacatgccacaaccacggtcacacctcactgtcatctg

SEQ ID NO: 48327 - DNA, 927 bp, Homo Sapiens
atgagacagataaatcagacacaagtgacagaattcctccttctgggactctctgatgggccacacaccgagcagctgctatttatcgtattattgggtgtctacctggtcactgtgcttggaaatctgcttctaatctcccttgttcatgttgactcccaacttcacacacccatgtatttttttctctgcaacttgtctctggctgacctctgtttctctaccaacatagttcctcaggcactagtccacctgctttccagaaagaaggtcattgcattcacactttgcgcagctcgacttctctttttcctcatttttgggtgtacccagtgcgcccttcttgcagtgatgtcctatgatcgctatgttgcaatctgcaatcctctgcgttaccctaacatcatgacctggaaagtgtgtgtccagctggcaacaggatcatggaccagtggcattctggtgtctgtggtagacaccaccttcatactgaggctaccctaccgaggcagtaacagcattgctcatttcttttgtgaggcccctgcactattgatcttagcatccacagacacccatgcatcagagatggccatttttcttatgggggttgtgattctcctcatacctgtttttctgattctggtatcctatggccgtatcatagtaactgtggtcaagatgaagtcaactgtggggagtctcaaggcattttctacctgtggctcccacctcatggtggtcatacttttttatggatcagcaattatcacttacatgacacccaagtcttccaaacagcaggaaaaatcggtgtctgttttctatgcaatagtgactcccatgcttaatcccctcatctatagcctgagaaacaaggatgtgaaggcagctctgaggaaagtagccacaaggaatttcccatga

SEQ ID NO: 48328 - DNA, 447 bp, Homo Sapiens
atgatgcccaatagtgtcatcatcatttgcagggatgcatggtgtcatcatctccagggatccacttcaaccatgtgccaccacctcccaggatttcattcaaacatgtgccactacctcccagtatccacttcaactatggtgttatcacctgccaggatccacgagagccaatgctgtcaccatccactaggatccaccataaccctggtgtcatcatctcctgtgatccatgaggtccagtgctgtcaccatccactaggatccaccatgaccctggtgtcatcatctcctgtgatccatgaggtccagtgctgtcaccatccactaggatccaccataaccctggtgtcatcatctcccaggatccatgaggtccagtgctgtctgtcaccatccactagtatccaccataaccctggtgtcatcttctcccaggatccatga

SEQ ID NO: 48329 - DNA, 796 bp, Homo Sapiens
agggggatcctgcaagcagaaatctgtggtgggcgggcggcaggtgagcaaggagaacgtgtctgtaaaggaagcacagggaacaggtggtggctttgtaagacagttggaacccaaggaaggcaggccatcccccaggaaagcctatgttggtgagggttatgatgggagaatgagtgaactgcagcctggcaccaccacaccctggaaggtgcagttgggaagaaagtttctgaggctgtagacatggggatcggatgctggagaaaccccctgctgctgctgattgccctggtcctgtcagccaagctgggtcacttccaaaggtgggagggcttccagcagaagctcatgagcaagaagaacatgaattcaacactcaacttcttcattcaatcctacaacaatgccagcaacgacacctacttatatcgagtccagaggctaattcgaagtcagatgcaggagagggtcagccactggatgcttggagtccacactaacagcacaactgattctcggcagctgacgacgggagtggagtatatagtcactgtgaagattggctggaccaaatgcaagaggaatgacacgagcaattcttcctgccccctgcaaagcaagaagctgagaaagagtttaatttgcgagtctttgatatacaccatgccctggataaactatttccagctctggaacaattcctgtctggaggccgagcatgtgggcagaaacctcagatgagggctcatatgattgagttgtgcactggctgttattaaactgtaaaggatca

SEQ ID NO: 48330 - DNA, 496 bp, Homo Sapiens
gcgccgtcctcaagttatattagaatcgtgtcctcccagctttggccagcttactattctaggacttgattccttcattcagtcacaatttattgagcaccgactttgcatcaagctcttgctgaagataacagtgctgacaatatacagccctgccctcagagcttatatagtagaggagaaaaagtgaacccataatatacagtcagtagcgagtatttactaagtactttctatttgcgaggccctgataaaagtactgtcctggccaggcgcggtggctcacgcctgtaattccagcactttgggaggtcgaggtgggcagatcacctaaggtcaggagttcgagatcagcctggctaacatggggaaaccccgtctctactaaaaatggaaaaattagctgggcatggtggcgggcgcctgtaatcccagctactcgggaggctgagacaggagaatgacttgaacccaggagttgcagtgagccaagata

SEQ ID NO: 48331 - DNA, 417 bp, Homo Sapiens
atgactgctctctttctgatgtccatgctttttggccttacatgtgggcaagcgatgtctttttgtattccaactgagtatacaatgcacatcgaaaggagagagtgtgcttattgcctaaccatcaacaccaccatctgtgctggatattgtatgacacgggatatcaatggcaaactgtttcttcccaaatatgctctgtcccaggatgtttgcacatatagagacttcatctacaggactgtagaaataccaggatgcccactccatgttgctccctatttttcctatcctgttgctttaagctgtaagtgtggcaagtgcaatactgactatagtgactgcatacatgaagccatcaagacaaactactgtaccaaacctcagaagtcttatctggtaggattttctgtctaa

SEQ ID NO: 48332 - DNA, 3750 bp, Homo Sapiens
gatgacagtgatgggattccgtggtcagaagaacgggtggtacgtaaagtcctttatttgtctctgaaggagttcaagaattcccagaagaggcagcatgcggaaggcattgctgggagcctgaaaactgtgaatgggctccttggtaatgaccagtctaagggattaggaccagcatcagaacagtcagagaatgaaaaggacgatgcatcccaagtgtcctccactagcaacgatgttagttcttcagattttgaagaagggccgtcgaggaaaaggcccaggctgcaagcacaaaggaagtttgctcagtctcagccgaatagtcccagcacaactccagtaaagatagtggagccattgctaccccctccagctactcagatatcagacctctctaaaaggaagcctaagacagaagattttcttacctttctctgccttcgaggttctcctgcgctgcccaacagcatggtgtattttggaagctctcaggatgaggaggaagtcgaggaggaagatgatgagacagaagacgtcaaaacagccaccaacaatgcttcatcttcatgccagtcgacccccaggaaaggaaaaacccacaaacatgttcacaacgggcatgttttcaatggttccagcaggtcaacacgggagaaggaacctgttcaaaaacacaaaagcaaagaggccactcccgcaaaggagaagcacagcgatcaccgggctgacagccgccgggagcaggcttcagctaaccaccccgcagcggccccctccacgggttcctcggccaaggggcttgctgccacccatcaccacccccctctgcatcggtcggctcaggacttacggaaacaggtttctaaggtaaacggagtcactcgaatgtcatctctgggtgcaggtgtaaccagtgccaaaaagatgcgcgaggtcagaccttcaccatccaaaactgtgaagtacactgccacggtgacgaagggggctgtcacatacaccaaagccaagagagaactggtcaaggacaccaaacccaatcaccacaagcccagttccgctgtcaaccacacaatctcagggaaaactgaaagtagcaatgcaaaaacccgcaaacaggtgctatccctcgggggggcgtccaagtccactgggcccgccgtcaatggcctcaaggtcagtggcaggttgaacccaaagtcatgcactaaggaggtgggggggcggcagctgcgggagggcctgcagctgcgggaggggctgcggaactccaagaggagactggaagaggcacaccaggcggagaagccgcagtcgccccccaagaagatgaaaggggcggctggccccgccgaaggccctggcaagaaggccccggccgagagaggtctgctgaacggacacgtgaagaaggaagtgccggagcgcagtctggagaggaatcggccgaagcgggccacggccgggaagagcacgccaggcagacaagcacatggcaaggcggacagcgcctcctgtgaaaatcgttctacctcgcaaccggagtccgtgcacaagccgcaggactcgggcaaggccgagaagggcggcggcaaggccgggtgggcggccatggacgagatccccgtcctcaggccctccgccaaggagttccacgatccgctcatctacatcgagtcggtccgcgctcaggtggagaagttcgggatgtgcagggtgatcccccctccggactggcggcccgagtgcaagctcaacgatgagatgcggtttgtcacgcagattcagcacatccacaagctgggccggcgctggggccccaacgtgcagcggctggcctgcatcaagaagcacctcaaatctcagggcatcaccatggacgagctcccgctcatagggggctgtgagctcgacctggcctgctttttccggctgattaatgagatgggcggcatgcagcaagtgactgacctcaaaaaatggaacaaactagcagacatgctgcgcatccccagaactgcccaggaccggctggccaagctgcaggaggcctactgccagtacctactctcctacgactccctgtccccagaggagcaccggcggctggagaaggaggtgctgatggagaaggagatcctggagaagcgcaaggggccgctggaaggccacacagagaacgaccaccacaagttccaccctctgccccgcttcgagcccaagaatgggctcatccacggcgtggcccccaggaacggcttccgcagcaagctcaaggaggtgggccaggcccagttgaagactggccggcggcgactcttcgctcaggaaaaagaagtggtcaaggaagaggaggaggacaaaggcgtcctcaatgacttccacaagtgcatctataagggaaggtctgtttctctaacaactttttatcgaacagcgaggaatatcatgagcatgtgtttcagcaaggagcctgccccagccgaaatcgagcaagagtactggaggctagtggaagagaaggactgccacgtggcagtgcactgcggcaaggtggacaccaacactcacggcagtggattcccagtaggaaaatcagaacccttttcgaggcatggatggaacctcaccgtcctccccaataacacagggtccatcctgcgtcacctcggtgctgtgcctggagtgactattccctggctaaatattggcatggtcttttctacctcatgctggtctcgagaccaaaatcaccttccatacattgactacttacacactggtgctgactgcatttggtattgcattcctgctgaggaggagaacaagctggaagatgtggtccacaccctgctgcaagccaatggcaccccagggctgcagatgctggaaagcaacgtcatgatctccccggaggtgctgtgcaaagaggggatcaaggtgcacaggaccgtgcagcagagtggccagtttgtcgtctgcttcccgggatcctttgtgtccaaagtgtgctgtgggtacagcgtgtctgaaaccgtgcactttgctaccacccagtggacaagtatgggctttgagaccgccaaggaaatgaagcgtcgccatatagctaagccattctccatggagaagttactctaccagattgcacaagcagaagcaaaaaaagaaaacggtcccactctcagtaccatctcagccctcctggatgagctcagggatacagagctgcggcagcgcaggcagctgttcgaggctggcctccactcctccgcacgctatggcagccacgatggcagcagcacggtggcggacgggaagaaaaagcctcgaaagtggctgcagttggagacgtcagagaggaggtgtcagatctgccagcacctgtgctacctgtccatggtggtacaagagaacgaaaacgtcgtgttctgtctggagtgtgctctgcgccacgtggagaaacagaagtcctgccgagggctgaagttgatgtaccgctacgatgaggaacagattatcagtctggtcaatcagatctgcggcaaagtgtctggtaaaaacggcagcattgagaactgtctcagtaaacccacaccaaaaagaggtccccgcaagagagcgacagtggacgtgcccccctcccgtgtcagcctccagttcatccaaaagtgcttcgagctcatcatgaagtgccaacgcccgtggtcgatttatatatatttttttgtaattattatattctag

SEQ ID NO: 48333 - DNA, 2172 bp, Homo Sapiens
gaagatgacgaggtggagggggcagaggcggacctgtctggagatggtactgactatgagctgaagcctctgcccaagggcgggaaacggcagaagaaagtgccagtgcaggagattgatgatgactttttcccaagttctggggaagaagctgaagctgcttctgtaggagaaggaggaggaggaggtcggaaagtgggaagataccgagatgatggagatgaagattattataagcagcggttaagtcccaagatgcctcgaacactaagtttacatgaaataactgaccttttagagacagatgacagcatagaagcaagtgctatagtgatacaaccacctgaaaatgctacagcacctgtttctgatgaggaatcaggagatgaagaaggtggaacaataaataatctgccaggttctttgttgcacacagctgcgtatcttattcaagatggctctgatgctgagtctgactcagatgatccctcatacgcacctaaagatgactctcctgatgaagttccatctacgtttactgtgcagcaacctccaccatcaaggaggaggaaaatgacaaaaattctttgcaaatggaaaaaagccgacctaactgtacaacccgtagcaggtagagttacagcaccaccaaacgatttcttcaccgtaatgagaactcccacagaaattcttgaactttttcttgatgacgaggtcattgaactcattgtcaagtactccaacttatatgcttgcagtaaaggtgtacatcttggcttgactagctctgaattcaaatgttttctgggaattatttttctgagtggttatgtctcagttcctagaaggcgtatgttttgggaacaaagaacagatgtgcataatgtactggttagtgctgccatgagacgtgaccggtttgaaactatattttctaatttgcatgttgctgacaatgcaaatttggatccagtggacaaattttccaaattgcgacctctcataagcaaacttaatgagagatgcatgaaatttgttccaaatgaaacatatttcagctttgatgaattcatggttccttattttggtcgtcacgggtgcaaacaatttattcggggaaagcccattcggtttggctataagttttggtgtggtgccacctgtctgggctacatttgctggtttcagccgtatcagggtaaaaacccaaatactaaacatgaggaatatggtgtcggtgcgtcacttgtccttcagtttagtgaggcacttacagaggcacaccctggacaataccattttgtattcaataactttttcaccagtattgcacttcttgataagctcagttcaatgggacatcaggcaacaggtacagtgagaaaggatcacattgacagagttccactggaatcagatgtagctttaaagaaaaaagaaagaggcacatttgattatcgaattgatggcaaaggcaatattgtctgcagatggaatgataacagtgttgtcactgttgcctcatctggtgctggtatccatcccctgtgtcttgtcagtcgttactcccagaaactgaaaaagaagatacaagttcagcagccaaacatgatcaaagtgtataaccagttcatgggaggcgtagacagagctgatgaaaacattgataagtatcgggcatcaatccgtggaaagaaatggtattcaagccctcttttgttctgtttcgaactggtcttacaaaatgcttggcaattgcataaaacatatgatgagaaaccagtggattttctggagtttcgtcgacgtgtggtatgccattatctggagacccatggtcatcctccagaacctggccaaaaaggaagacctcagaagcgtaacattgactcacgttatgatggcataaatcatgtgatagtcaaacagggaaagcaaacgcgatgcgctgaatgtcataagaacacaacttttcgatgtgaaaaatgtgatgttgccttacatgtgaagtgttccgttgaatatcacactgaatagcaggtgtcaccacctcctgagataagaaacatagttttatacattatgtacagtgtagcagtggttttgcctagtgttccaattttggaacgtcacataacaatggaacataataaatttttttttctcttcaaa

SEQ ID NO: 48334 - DNA, 273 bp, Homo Sapiens
agatacctgaaaatgtggaagcaacattggaactggataacaggcagattagaacagtttggagggctcaaagaagacaggaagatctgggaaattctggaacttcctagagacttgttcaatgcctttcaccaaaatgccgatagtgatatggacaatgaaatccaggctgaagtgatctcagatggagatggagagcttgttgggaactggaataagattcactcttgttattttagcaaagagactggcagcattttgcctttgccctag

SEQ ID NO: 48335 - DNA, 900 bp, Homo Sapiens
cagcagctcgtcctccagggcctgggcccatggggcttccgtctcgtgggtgtcaaggacttcgagcagcctactatttgccgggtcactcctggaagcaaggtggctctagctaatttatgtatcagagatgtaatcacagccattgatggggaaaattctagcaatatgacgcacttggaagctcagaacagaatcaaaggctgcaaagacaacatgactctcactgtagccagatccgaacataaagtctggtctcctgtgatggaggaagagaagtgtcgtccatacaagatgaatttagtctctgaaccccaggaggtcctgcacataggaagcgcccacaaccgaagttccatgccctttaccacctcgcctgcctccagcactaacgccagggtcatcacaaaccagtacaacaacccagctggcctctactcttctgaaaatatatccaacttcaacaacgccctggagtcagactgctaccagcggggtagaggcgaacatgctcagcctccaatcagccttgtcatcgacaaagaatctgaagtttgcaaggtgcttcaggagatacgggagttgaatgagcccccaaaacagtctgtgtcttttctggttttgcagaaaatcctggagtctgaagaaaaagaggatcccaacaagccctcaggattcagaagtgttaaagctcctgtcactaaagtggctgcattgattggaaatgctcagaagttgcctatgtgtgacaaatgtggccctggaattgtcggtgtgttcgtgaagctgtgggaccgtcaccgccatcccgagtgttacttgtgcactgactgttgcaccaacctgaaacagagggaccatttctttgtggaggatcaaatctactgtgagaaacatgcc

SEQ ID NO: 48336 - DNA, 2075 bp, Homo Sapiens
atggcggttctactggagaccactttaggcgacgtcgtcatcgacttgtacaccgaagaacggccgcgtgcctgcttgaatttcttgaaactgtgcaaaataaaatattacaattattgccttattcacaatgtacagagggattttatcatacaaactggcgatcctacagggactggccgtggaggagagtctatctttggccaactgtatggtgatcaagcaagcttttttgaggcagaaaaagtcccaagaattaagcacaagaagaaaggcacagtgtccatggtgaataatggcagtgatcaacatggatctcagtttcttatcaccacaggagaaaatctagattatcttgatggtgtccatacggtgtttggtgaggtgacagaaggcatggacataattaagaaaattaatgagacctttgttgacaaggactttgtaccatatcaggatatcaggataaatcatacggtgattttagatgatccatttgatgaccctcctgatttattaatccctgatcgatcaccagaacctacaagggaacaattagatagtggtcgaataggagcagatgaagaaattgatgatttcaaaggaagatcagctgaggaagtagaagaaataaaggcagaaaaagaggctaaaactcaggctatacttttggagatggtgggagacctacctgatgcagatattaaacctccagaaaatgtactgtttgtgtgtaaattgaacccagtgaccacagatgaggatctggaaataatattctctagatttgggccaataagaagttgtgaagttatccgagactggaagacaggagagtccctctgttacgcttttattgaatttgaaaaggaagaagattgtgagaaagcattcttcaaaatggacaatgtgcttatagatgacagaagaatacatgtggattttagccagtcggttgcaaaggttaaatggaaaggaaaaggtgggaaatacaccaagagtgatttcaaggagtatgaaaaagaacaggataaaccacctaatttggttctgaaagataaagtaaagcccaaacaggatacaaaatacgatcttatattagatgagcaggccgaagactcaaaatcaagtcactcacacacaagtaaaaaacacaagaagaaaacccatcactgttctgaagagaaagaagatgaggactacatgccaatcaaaaatactaatcaggatatctatagagaaatggggtttggtcactatgaagaagaagaaagctgttgggagaaacaaaagagtgaaaagagagaccgaactcagaaccgaagtcgtagccgatctcgagagagggatggccattatagtaatagtcataaatcaaaataccaaacagatctttatgaaagagaaaggagtaaaaagagagaccgaagcagaagtccaaagaagtccaaagataaagaaaaatctaagtatagatgaaagatgaagaggcagaattgagaggctaacatatttactcttgtctaacttaagagtgccaggaaagcagatgcttagattttgtgtcaaagcttgttatttttttcatactaggattatggtctttagattaatactgattatatagagcacggaaagataaagaattgaacattttctttgtatacttttttacactaattttattgttatacataaatggtagtcttcatttttgaagtcttacattttcactctttttttaatgaagtatttcatactacaaaaatacataaacgtatatataaagggataataaatgtaaatatctgtgtactcatcagccagcttaagatacagatgttgtcgacattttagaagttccctaaggccctctccctctcaaataattatttggaattttgtgtttgtcatttgtctattatagttttacaacatacgtatgtatctgtaagtgaaatgttaattttgtatgtttctgaattttatataaatggcaaaatgtttacttctgtgactttctttcatttttattgctatatagtattatataaatatactacaacttattcatt

SEQ ID NO: 48337 - DNA, 574 bp, Homo Sapiens
gaagaagtggggtgacttaggggctgagcctcagcaactgggagagtttataagctgggatagcagacccctcagcaccacccattctcctcatccctctgctctctggcctccagcctcccagcagcatggctttcaccggcaagttcgagatggagagtgagaagaattatgatgagttcatgaagctccttgggatctccagcgatgtaatcgaaaaggcccgcaacttcaagatcgtcacggaggtgcagcaggatgggcaggacttcacttggtcccagcactactccgggggccacaccatgaccaacaagttcactgttggcaaggaaagcaacatacagacaatggggggcaagacgttcaaggccactgtgcagatggagggcgggaagctggtggtgaatttccccaactatcaccagacctcagagatcgtgggtgacaagctggtggaggtctccaccatcggaggcgtgacctatgagcgcgtgagcaagagactggcctaagcagccaggcccggcccagggagctacaaacccaccaataaaactgatataaggacaga

SEQ ID NO: 48338 - DNA, 930 bp, Homo Sapiens
atggaaggaataaataaaactgcaaagatgcagtttttctttcgtccattctcacctgaccctgaggtccagatgctgatttttgtggtcttcctgatgatgtatctgaccagcctcggtggaaatgctacaattgcagtcattgttcagatcaatcattccctccacacccccatgtactttttcctggctaatctggcagttctagaaatcttctatacatcttccatcaccccattggccttggcaaacctcctttcaatgggcaaaactcctgtttccatcacgggatgtggcacccagatgtttttctttgtcttcttgggtggggctgattgtgtcctgctggtagtcatggcttatgaccagtttatagcgatctgtcaccctctgcgatacaggctcatcatgagctggtccttgtgtgtggagctgctggtaggctccttggtgctggggttcctgttgtcactgccactcaccattttaatcttccatctcccattctgccacaatgatgagatctaccacttctactgtgacatgcctgcagtcatgcgcctggcttgtgcagacacacgcgttcacaagactgctctgtatatcatcagcttcatcgtccttagcatccccctctcattgatctccatctcctatgtcttcatcgtggtagccattttacggatccggtcagcagaagggcgccagcaagcctactctacctgctcttctcacatcttagtggtcctcctgcagtatggctgcaccagctttatatacttgtcccccagttccagctactctcctgagatgggccgggtggtatctgtggcctacacatttatcactcccattttaaaccccttgatctatagtttgaggaacaaggaactgaaagatgccctaaggaaagcattgagaaaattctag

SEQ ID NO: 48339 - DNA, 408 bp, Homo Sapiens
tggttcctgccgtccggactctttttcctctactgagattcatctgtgtgaaatatgagttggcgaggaagatcgacctattattggcctagaccaaggcgctatgtacagcctcctgaaatgattgggcctatgcggcccgagcagttcagtgatgaagtggaaccagcaacacctgaagaaggggaaccagcaactcaacgtcaggatcctgcagctgctcaggagggagaggatgagggagcatctgcaggtcaagggccgaagcctgaagctcatagccaggaacagggtcacccacagactgggtgtgagtgtgaagatggtcctgatgggcaggagatggacccgccaaatccagaggaggtgaaaacgcctgaagaaggtgaaaagcaatcacagtgttaa

SEQ ID NO: 48340 - DNA, 4602 bp, Homo Sapiens
gcggtagcggcggcggcggcggcggcggtggcggcggcggcggcgcggcgtgtggagcgagggagcggcgcgagcggcggcatgacgcggaggcggagcaggccgagcggcggtgcgggcaggcgcgagcgggctcgggccgcggggccgcagaagccccaggcgcccgagcccccgccgccgccaagcctggaggcgggagcgggtgcaggccctccggaggcgccggcggagcccgaccacgacggccccagggaggatgacgaacccaacctggtgcccggcccgcaggtaggagcgagcggggagacttcggcggctcgggcgctttcaccttccccgagcgggagcgggagtggggcggggttggggatgggccatcctgccgcggctggggtagcagccttcccccgggtccggcgccgaagctttctcccccggggcgggaatggaggctggacccctctccccaaagccgaggctcggtccgcgctcctgcgactaggctgaagctgctcccctctccccgccgcctccgggcgttctggccgtacacccacactgggactgggactgggactgggctgtgatcccgaggccgcagctccgctctcggcccgccacctcccccgggcccacctgctccctcagccacaggccatctcggggctctgggactggacgactgcagcctcttccctctgcccccgggaacggctccactccgtcccctgcagcgcctgcagccgcggccccctcagcagctgtgtctcctggcgcctcctcgccatacccagcagagcagttggagcagacagccaggctgcccggaggagtttttggtggggtttctgcactgaggtggaaacccagcagaacctgcccttcttccctcccctgctccgcaaggcagcccaccccgaccttgagatcccaggtttggagaatcctgctgagagcgaacagtaggaggattccccaaagcttccagcttgccacctggaagaaggtcactttcttttgagcaaaggagataacgggaggtaccctgccaaagttcactgagaggcgggggtgacatgggccacggttgctctgggagggttgtggcactcggggctgggtggctctccctaagcttgctctgacaaaagagttttgagttggtcttttggctgagcctgcccaggaaggcaggctcctgcaggagtcttggagggtcggatgcggcgccggatgaggatgaggcgtggcggaagatgcgtttggctctgcagacactgcatcgggcagcaggggactctgggaggctggtgcagccagaaggcatggctcttgacagccttctagtagaatctctggaattgtgcatatgaagaaacagaaactcagagcaactaaacatttgcccaaatgactccaactgtaggtgtcagacaaaagaaaagaaaaggacttttaggtcccccccgcctccagccagcctgtgcagacttgctgcctgctgtgtcaccgggaacgcaaaggctgggaagaaggcccttctcaaaatggactggtgttgcagggtgagaagctgccccctgacttcatgccaaagctcgtcaagaatctcctaggcgagatgcctctgtgggtctgccagagttgccgaaagagcatggaggaagatgaaaggcagacaggtcgagaacatgcagtggcgatctccttgtcacacacatcctgcaaatcacagtcttgtggagatgactctcattcgtcctcgtcttcctcctcatcatcctcatcctcgtcctcctcttcctgccctgggaactcgggagactgggatcctagctcgttcctgtcggcacataagctctcgggcctctggaattccccacattccagtggggccatgccaggcagctctcttgggagtcctcctaccatccccggtgaggctttccccgtctcggagcaccaccagcactcagacctcactgctccccctaacagccccaccggccaccacccgcagccagcatctctaatcccgtctcaccccagctcctttggctccccaccccacccacacctgctgcccaccaccccggcagcacctttccctgcccaggcttcagagtgccctgttgctgctgccactgccccccacactccagggccatgtcagagctcccatctaccctccaccagcatgccgctcctgaagatgcccccaccattctcggggtgcagccacccctgcagcgggcactgtggtgggcactgcagtgggcctcttctcccacccccgagctctcagccactccctagcactcacagggatcccgggtgcaaggggcacaagtttgcacacagtggcctggcttgccagctgccccagccctgcgaggcagatgaggggctgggtgaggaagaggatagcagctctgagcgaagctcctgcacctcatcctccacccaccagagagatgggaagttctgtgactgctgctactgtgagttcttcggccacaatgcggcaaaaggaaaggaaatggcagagagaaagctatgattctgatgagtatgtatacgtgtgtaatcccagagaagtgaacgcttgggagtgatgaaggcagagtggaagcaaaaaggctctcagtcccccaagtgtgacagccagccgagggacaggccgtgagcacagacggcgccaggaaggaggctcagatcagagggcatgctggctctggccagggggaggaagcagtgcagaagtctcataagccacccgctgccccgacgagtcggaactataccgagatccgggagaagctccgctcgaggctgaccaggcggaaagaggagctgcccatgaaggggggcaccctgggcgggatccctggggagcccgccgtggaccaccgagatgtggatgagctgctggaattcatcaacagcacggagcccaaagtccccaacagcgccagggccgccaagcgggcccggcacaagctgaaaaagaaggaaaaggagaaggcccagttggcagcagaagctctaaagcaggcaaatcgtgtttctggaagccgggagccaaggcctgccagggagaggctcttggagtggcccgaccgggaactggatcgggtcaacagcttcctgagcagccgtctgcaggagatcaaaaacactgtcaaagactccatccgtgccagcttcagtgtgtgtgagctcagcatggacagcaatggcttctctaaggagggggctgctgagcctgagcctcagagtctacccccctcaaacctcagtggctcctcagagcagcagcctgacatcaaccttgacctgtcccctttgactttgggctcccctcagaaccacacgttacaagctccaggcgagccagccccaccatgggcagaaatgagaggcccccacccaccatggacagaggtgagggggccccctcccggtatcgtccccgagaacgggctcgtgaggagactcaacaccgtgcccaacctatcccgggtgatctgggtcaagacacccaagccgggctaccccagctccgaggagccaagctcaaaggaagttcccagttgcaagcaggagctgcctgagcctgtgtcctcaggtgggaagccacagaagggcaagaggcagggcagtcaggccaagaagagcgaggcaagcccagccccccggcccccagccagcctagaggttcccagtgccaagggccaggtcgctggccccaagcagccaggcagggtcctagagcttcccaaagtaggcagctgtgctgaggctggagaggggagccgggggagccggccaggaccaggttgggctggcagtcccaaaactgagaaggagaagggcagctcctggcgaaactggccaggcgaggccaaggcacggcctcaggagcaggagtctgtgcagccctcaggcccagcaaggccacagagcttgccccagggcaagggccgcagccgccggagccgcaacaagcaggagaagccagcctcctccttggacgatgtgttcctgcccaaggacatggacggggtggagatggatgagactgaccgagaggtggagtactttaagaggttctgtttggattctgcaaagcagactcgtcagaaagttgctgtgaactggaccaacttcagcctcaagaaaaccactcctagcacagctcagtgaggccctgcccaggctgagctgcttcagggcgtcctgaggccctgactgccagctgaaggcgtataatttttccctccgtgtgccccacctacccgtccaagaccctctgtgctccccaccatcctggaccaaccaaaagctgaacggatgccacactgtgctggggccccttgacctcagcagagccgcttcctggtgctacgcagcctccacactcagagcccgtggactgggctggcctaagggccagggctgatggtactgctggcccaacactgctctctttgtgtttggtttttttgtttttgtttttattttgtttttttccaattctttacttttgatactgtgaagatctttcgtgccgaaagataaagcaacatttggacacag

SEQ ID NO: 48341 - DNA, 525 bp, Homo Sapiens
ctcgtgctctgtcacgtttgtatctcaccatcaaattgcagttttgcccctagttttgcccatgggcatcctaaacaagttaatttatgcaactgtttcaaaaatgaggctgtatataaatgtgatgaaggctacactgtgatcggacaggtgaaactcacctgcatttcttcctgctggtcatctccagcccctcaatgtaaaactctgtgtctgaaaccagagacagaaaatggaaagctgtctggtaaggatctgtatgttgaacttgaaaatgtcaccatccagtgtgactctggctataaagtggttggtcctcaaaatatcactttgagcacagaacatggcaggcacccagaggtgcccagttgtgagtggaaagtctctgaaggctgtgacatagtcatggcaggcaaaaccctcttacaccgtctcccaggtcacagggtctcaatagtggccctacagttacataaactgtctctacagatggaaaaactgaagcaagagagagacaaggagaaa

SEQ ID NO: 48342 - DNA, 586 bp, Homo Sapiens
atggcggcagccgtggtgctggctgctgggttgcgcgcggcgcgcagagccgtggcggccacgggggtgcgcggggggcaggtccgaggagctgcaggtgtgactgatgggaatgaagtggccaaggcccagcaggcaactcctgggggagcagccccaaccatcttctcccggatcctggacaagagcctcccagctgacattctctatgaggaccagcagtgtcttgtgttccgtgatgtggcccctcaggctcctgtgcacttcctggtcattcctaagaagcccattcctcggattagccaggctgaagaagaagaccagcagcttctaggacacctactccttgtggccaagcagacagcaaaggctgagggcctgggagatggataccgacttgtgatcaacgatgggaagctgggtgcacaatctgtgtatcatctgcacattcatgtacttgggggccggcagctccagtggcctccaggttgaacctgccaactgattaaaggacaccagactctggatgcttggatggaaagggaaaaatggaccctgtgatgctaataaaactgttctcccttaa

SEQ ID NO: 48343 - DNA, 1302 bp, Homo Sapiens
atgacggctgtctcctcaaacagggaccatgaggatgatggctgtcttctcaaacaggagccccgaggacgacggctgtctcctcaaacagggaccccgaggacgatggctgtcttctcaaacaggagccccggggacgacggctgtctcctcaaacaggagccccggggacgacggctgtctcctcaaacaggaaccccgaggacgacggctgtctcctcaaacagggaccccgaggatgatggctgtcttctcaaacaggagccccggggactgtctcctcaaacaggaaccccgaggatgacggctgtctcctcgaacaggagccccggggacgacggctgtctcctcgaacagggaccccgaggacgacagctgtctcctcaaacagggaccccaagaatgacggctgtctcctcaaacaggaaccccgaggacgacggctgtctcctcaaacaggaaccccggggacgacggctgtctcctcaaacaggaaccccgaggacgacggctgtctcctcaaacaggaaccccggggacgacggctgtctcctcaaacagggaccccgaggacgacggctgtctcctcaaacagggaccccggggacgacggctgtctcctcaaacagggaccccggggacgacggctgtctcctcaaacaggaaccccgaggacgacggctgtctcctcaaacaggaaccccggggatgacggctgtctcctcaaacagggaccccggggacgacggctgtctcctcaaacagggaccacgaggacgacggctgtctcctcaaacaggaatcccgaggacgacggctgtctcctcaaacagggaccccggggacgacggctgtctcctcaaacaggaaccccgaggacgacggctgtctcctcaaacaggaatcccgaggacgacgactgtctcctcaaacagggaccccggggacgacggctgtctcctcaaacagggaccccgaggacgacggctgtctcctcaaacaggaaccccgaggacgacggctgtctcctcaaacaggaaccccgaggacgacggctgtctcctcaaacagggaccacgaggacgacggctgtctcctcaaacaggaatcccgaggacgacggctgtctcctcaaacagggaccccaggacggctgtctcctcaaacaggaatcccgaggacgacggctgtctcctcaaacagggaccacgaggacgacggctgtctcctcaaagaggaatcccgaggacgacggctgtctcctcaaacaggaaccccgaggacgacggctgtcttctctaa

SEQ ID NO: 48344 - DNA, 3574 bp, Homo Sapiens
gccgcgcgttctccctgcactctcttcgcggtcccatctgttccccatggcgtctcatccgcaaacccggatccaggcttacctggagaagaacaagatcggtcccctgtttgaggaattaatgaccaagttaataactgagacacctgaccagccaatcccatttctcattgaccatcttcagtctaaacaagggaaccgtggacaacttcaaagaactttgtctggatctgcagctctatgggcagaaagtgaaaaatcagaatccaaaggaacaagaagggatttcagaagctatgataaaccttggcaattaaatgcaaagaagcctaaaaaatcaaaaagtgaccttgctgtgtctaatatttctccaccatcaccggactccaaatcattgccaaggtcagtagagcatccaaagtggaactggaggactaaaccacaaagccgtgattttgatgaattgaatcacatccttcaggagagcaagaagctggggaaagcccttgagaatctctctcgaagtattgcaatttcagatgaactcgataaggaaacagtgacatttaattcttctcttctgaggccccgtgtgattggagaatggattggtagagaagaaaatgatgctgatcccctagctgctgaaatgctacagcctccaattccaagaagcaaaaatgaccaatgggaaagtgaagatagtggctctagtcctgcaggaagcttaaagatggagcctaagaacaaaggattaaaacagcagcaacagcaacataagaaactcctggccgcaatgctctctcaagattcttttgagtccatccacagccctaccccatctgtaacagaagaagatattgataatgaagatgatgcaatggaattgctgggtaattttaaaaattaataatttctcattttcttctttgacattgtaaaaaaaacgtgtggtgattaagagattttaaaagttttgaatagccttgtcttagggaaaagaaaccatttagtacatattttatttacattagactcacataaagttgcatgtaagaactaaattgaaataccctaagcatatgaatatttattagactgtattttgtgctttgtgtatgctgcactttaccttctgactacgtaatgaagcgttattctgtgtgcaactgtgatcaaaattcaagtctgtctgctttattctctgataataattgccttgtttacatctattgtctataaaatatacccaaagtacatatttcagccctcactccaaaatgtctaccttttattttgaggatgctttagaaaaatagaataaagttgaaaggggcagatagtaaattcaggttttatgttttccgtaaatgacgggaaagtttgcagagatttcaaagtttcttcaggcctgttactttcatgaaaccttattaatcttgtatatgtaggatatctttttatattttttaatgtagtatatgtatgtttttgcttcatcagaaatctcttcatataaatttttaaactgaacttctctttggaacatcatttttctgaagaaagaaaatgaaatgttatttcagagtgatccacatataaaacaatgagttttgaagtcagtggtatcaattattctgctacaaataaagagtatgattttcaaatactttataacaatatgctgttgtattttatttagaaagagaataaataatataattatttgaaagccttaaacacgttttacatatagaatatggaatctcagaaaaatataggccattttctgaagtttttgttaaaaatgagattccttggttttaagtgtttatggcagtaaaatactatcattataaaaaatgatatattgcttatcatttttgcataggcctacaaaggtgttatttggtcaatggtgacaggtttgaaagatgttttctgatgctgtaaaaactgcattcatgctaacattaaggagattgtatcatggcgttttcattacatgctgttggtcccttccaattgggtcttttcctcacctccaaatcattaacatggcagacgtgccctatgtggcagtggtagcttcattcaacaaacatttactgagcacttactctatgctaagcacttggctggggtctgggaacataaaaataaaatcattgtgatctgtgtttgaaggaattttacattgtaatgttcaagatacaatacgtcactacctgtgctaactgcgctaattggatgaagcacacagttgtgtataggggtaacacctaaagcagaggtaagggacagtgacccaggaatgtttcctagagaagccgattactctggctagtcctgaaaagcaaatagatgtaagctcagcaggtggggtgtggtcattgtaggtttgctcacgtaggtatgggctgttttgcgattgtgctccataactatacctgtaaatggttcctctgctttggacagtaacagggaaggggcaactgagatccagggtttctttcaggagatgcagttgtccactccatgctggtactccctagatctcagctgccctgactgaaggttctagtctcccaagctgaagaccgaggattgagtcttggagactatctaatgatgagcaattaataactagtcctcattaattctttttttagacattttagcctgtggtctgagcaagtttaataataagagatagttgaaggtttggactttcttcatgtaattccacatatctcagcacaggtggcaagcagtgtaataatgttggtctctaggtcatgagattatcctcttatagcttggaatgttacaagtccactggactttatcttaaaataatgccatattcaatttcttgtttttgaaatggattccagcaaaatgtatgtgattgtgtctatttcagaaaaatataaatgctaagttcttggaaatttatgtgaaatctaattttatagagtttatatagaatcattgtaagatgcaatagagacatctggtatttaaaatctttttgaatctacattttgtagatgtgtgtgctatagcttatgtgtttgtaaatgtttaacttgtctttgttatctataccaagatataactggctgaaaaatatttattatgcatggaaagcactctgtaaaccttgtgaagtgataaataagtgaaaggtataattgttagttgacattaatataaaaaaggattattcttcaataaaattggttgatttgaagggaaaaaatccttttagttgaactagtagaagttagtaataactattgactcttgttttgtttattaaggaaactagcattgttaatatatactgattaatatttaattattcacagttgtttaattatatatttgtggatttcttttctaaatgttttaggcatatgaaaatattatagtacaacacctgtaatttttaagtagatcaaatattttctgtaagattgctttaaatgctccttataaattcacattgcaaaagtaacttaatatggaattaacacttgtcagataataaaacagccaaacttgtgaa

SEQ ID NO: 48345 - DNA, 564 bp, Homo Sapiens
atgtacctcatcattgtatttggaaacttgcttatcatcctggttatcattttatgctcccacctccacacctccatgtacttctttctctccaacctgtcctttgtagacatctgttttgcctccaccagggtcccaaagatgctggtgaatatccaggcacagagcaaagtcatcacctctgcaggctgcatcacccagatgtactttttcatacattttgtaggattggacagcttcctcctgactgtgatggcctatgaccggtttgtggccatctgtcaccccctgtactacacggtcatcatgaaccctcaactctgtggattgctggttctggtatcctggatcacaattgtctccttgttttactgtacaagcctaggagtgtaccttagctcggctgcatcccacaactcacactcaggtgcaatagcctcagtgaggtacactgtggtcacccccatgctgaaccccttcatctacagcctgaggaataaggacataaagagggctctgaagaattctttgggagggaaactagaaaagggccagttgtcctag

SEQ ID NO: 48346 - DNA, 621 bp, Homo Sapiens
caggctctgccctgcaccttagggctcgggatgctgctggccctgccaggggccttgggctcgggtggcagcgcggaggacagcgtgggctccagctctgtcaccgttgtcctgctgctgctgctgctcctactgctggccactggcctagcactggcctggcgccgcctcagccgtgactcagggggctactaccacccggcccgcctaggtgccgcgctgtggggccgcacgcggcgcctgctctgggccagccccccaggtcgctggctgcaggcccgagctgagctggggtccacagacaatgaccttgagcgacaggaggatgagcaggacacagactatgaccacgtcgcggatggtggcctgcaggctgaccctggggaaggcgagcagcaatgtggagaggcgtccagcccagagcaggtccccgtgcgggctgaggaagccagagacagtgacacggagggcgacctggtcctcggctccccaggaccagcgagcgcagggggcagtgctgaggccctgctgagtgacctgcacgcctttgctggcagcgcagcctgggatgacagcgccagggcagctgggggccagggcctccatgtcaccgcactgtag

SEQ ID NO: 48347 - DNA, 1873 bp, Homo Sapiens
attctattgcggatacaacagatcatctattgtcacaagctaaccattatcctaacaaaatggcggaatacagcaagacataagagtaaaaagaaagaagatgagctgatattaaaacatgaacttcaattgaaaaaatggaaaaataggttaatactcaaaagagctgctgcagaagaatccaattttcctgaacgaagttcttctgaagtctttcttgtagatgagactctaaaatgtgacatttcactgttacctgaaagagcaatattacagattttcttctacctcagtttaaaagatgtgataatatgtggtcaagttaatcatgcctggatgttgatgacacaactaaactcactgtggaatgctattgatttttcctcagtgaaaaatgtgattccagataaatatatagtgtctactttgcaaaggtggcgtttaaatgtgctgcgtttgaattttcgtggttgtcttctccgacccaaaactttcagatctgtcaacagcagcctcagatccctttcacctttgaagcaactgactgtgttgaatttggcaaattgtgtaagaattggtgatatgggactaaagcaatttcttgatggtcctgcaagcatgaggataagagagctaaatttaagcaactgtgtgcggctaagtgatgcctctgttatgaaactatctgagcgctgccctaatttaaactacttgagtttacgaaattgtgaacatttgactgcccaaggaattggatatattgtaaacatcttttccttggtatcaatagatctctctggaacagacatctctaatgagggtttgaatgtgctttccagacataaaaaattgaaggaactttctgtatctgaatgttatagaatcactgatgatggaattcaggcattctgcaaaagctcactgatcttggaacatttggatgtctcttattgctcccagctgtcagatatgattatcaaagcactggccatttactgcattaacctcacatctctcagcattgctggctgtccaaagattactgactcagcaatggagatgttatcggcaaaatgccattacctgcacattttggatatctctggttgtgtcttgcttactgaccaaatccttgaggaccttcagataggctgcaaacaactccggatccttaagatgcaatactgcacaaatatttccaagaaggcagctcaaagaatgtcatctaaagttcagcagcaggaatacaacactaatgaccctccacgttggtttggctatgatagggaaggaaaccctgttacagagcttgacaacataacatcatctaaaggagccttagaattaacagtgaaaaagtcaacatacagcagtgaagaccaagcagcgtgaccttcagcctcaagcaggaagaacaaaaaatcaagaacttggcaagttttctccatttgttgcaagtatgtttactagctgaatctcaataacaatgtaaacaagcaacaaaccatcttctgattcttattccaactacaaatatttccaaacacatcagtagttcttctgtctaaataatcatgatttaaaaaagaagccaggccaggagcggtggctcacacctgtaatcctagcactttggtaggccaaggcgggtggaccataagtcaggagttcaagaccagcctggccaacatggtgaaaccccatctttactaaaaatacaaaaattagccgggtgtggtggtgggcgcctgtaatcccagctactcaggaggctgaggcaggggacttgcttgaacctgagaggcggaggttgcagtgagcctagatcacgtcactgcattccagcctcggcgacagagcaagactccgtctc

SEQ ID NO: 48348 - DNA, 486 bp, Homo Sapiens
gtgccatggaagtttgaccccaacgagatcaaagtcatatacctgaggtgcaccaggagtgaagttggtgccacttctgcgctggcccccaagatcggccccctgggtctgtctcccaaaaaggttggtgatgacattgccaaggcaacgggtgactggaagggcctgaggattacagtgaaactgaccagtcagaacagacaggcccagattgaggtggtgccttctgcctctgacctgatcatcaaagccctcaaggaaccaccaagagacagaaaaaaacagaaaaatattaaacatagtgggaatatcacgtttgatgaaatcttcaacattgctcaccaatccttagctagagagttccctggaaccattaaagagatctcggggactgcccagtctgtgggctgcaatgttgatggccaccaccctcatgacatcatagatgacatcaacagtggtgctgtggaatgcccagctagttaa

SEQ ID NO: 48349 - DNA, 2362 bp, Homo Sapiens
acctgattccgttcctcagctcgcattcctccgcccgtcccgctcccgccgccagcggaggccctagtctcccgctccaactattccaaccatcccgggaagggtggggcgctcggctcttgggtccccctccgccgccccgcctcgtcgatctccccttctgccccggtccctccctttctggggtggggccagccaatcagcgatcagactccggagtttggcccgggagctggggagctcaccgatcccccgcccagcagttctggccgctgtcccggtgcgcacggacgtggctcgagtttcctctgctctccgctctcgcccgctagctctcctcccttccgctcctgcttctctccgggtctcccgctccagctccagccccacccggccggtcccgcacggctccgggtagccatggaggaccccacgctctatattgtcgagcggccgcttcccgggtaccccgacgccgaggccccggagccttcctccgctggggctcaggcagcggaggagccgtcgggggccggctcagaagagctgatcaagtcggaccaggtgaacggcgtgctggtgctgagcctcctggacaaaatcatcggggccgtagaccagatccagctgactcaagcacagctggaggagcggcaggcggagatggagggcgcagtgcagagcatccagggcgagctgagcaagctgggcaaggcgcacgccaccacgagcaatacggtgagcaagctgctggagaaggtgcgcaaggtcagcgtcaacgtgaagaccgtgcgcggcagcctggagcgccaggcggggcagatcaagaagctggaggtcaacgaggccgagctgctgcggcgccgcaactttaaagtcatgatctaccaggatgaagtgaagctgccggccaaactgagcatcagcaaatcgctgaaagagtcggaggcgctgccagagaaggagggcgaggagctgggcgagggcgagcggcccgaggaggacgcagcggcgctggagctttcgtcggacgaggcggtggaggttgaggaggttattgaggagtcccgcgcagagcgtatcaagcgcagcggcctgcggcgcgtggacgacttcaagaaggccttctccaaggagaagatggagaagaccaaggtgcgtacccgcgagaacctggagaagacgcgcctcaagaccaaggaaaacctggagaagacgcggcacaccctggagaagcgcatgaacaagctgggcacgcgcctggtgcccgccgagcggcgcgagaaactgaagacgtcgcgggacaagttgcgcaaatccttcacgcccgaccacgtggtgtacgcgcgctccaagaccgcggtctacaaggtgccacccttcaccttccacgtcaagaagatccgcgagggccaggtggaagtgctcaaggccaccgagatggtggaggtgggcgccgacgacgacgagggcggcgcggagcgcggggaggccggcgacctgcggcgcgggagcagccccgacgtgcacgcgctgctggagatcaccgaggagtcggacgccgtgctggtggacaagagcgacagcgactgagccgcccccgctgccacccaccccattcctcgctccttccgaacttcctctttcgcattctctctcggctcgagctggctgagatttttctaaattgaaaacacgcccccctccccacacctccaggaactccactcccagtcttagagctgttaggacccgatggggaggcagcccccgcagtggacaacccccgcttggacacagtccgagtggaatgggaagggaatggtcaatccctgtcctggttgtccaagtcgggatctcagaggaaattgcagtgattccacggttaggcccccctgggggggctgccttcccctcagcctctccccacaccacccacccagctgctgtcattccgctcactgagctcttcttcattctcaccctgatccctgggggactcaaagccaaaactgcccaaagaggaaagattgaatcctaaaggggatccctgcccccatgggaggccccctactagaaggacgtgaaagcagcttttgggggaaactgaggcagtggggaagacagagcagaatgagccctcaccctggctgggggtccagcacaggctgtatctgcagagggtcccagaggaacgctggagccaagagaagccctgggaaggaggggtggggaacgacatgcatgtgagggatggcacactgatgtgtttatgcacctgtacacaggagcgcatggccatggctttggaaaggagaatggaaaaatagaagaaggtcggccgggcttggtggcttatgcc

SEQ ID NO: 48350 - DNA, 1845 bp, Homo Sapiens
tctaccaggtctatggaaatgcaggacctagcaagtcctcatactcttgttggaggtggtgatactccaggtagctccaaactggaaaaatctaatctcagcagcacatcagttactacaaatgggacaggaggggaaaacatgactgttttaaacacagcagactggttgctgagttgcaacaccccctcttctgcaacaatgtctcttcttgcagtcaaaacagagcccttgaacagcagtgaaaccacagccacgactggagatggagcgcttgacacttttactgggtcagtaattacaagtagtggctacagccccagatcagcacatcagtattccccacagctgtatccttccaagccctatccacacattctttctacaccagcagctcaaacaatgtctgcctatgcaggccagactcagtattcggggatgcagcagccagccgtctacacagcctactcacagacaggacagccctacagcttgcccacttacgatttgggtgtgatgttgccagccatcaagacagagagtggactttcccaaactcagtccccattacagagtggctgcctcagttacagcccagggttctctaccccacagccaggccagacaccttattcttaccaaatgccaggttctagttttgcaccatcatctactatttatgcaaataattcagtttccaattcaacgaatttcagtggttcacaacaggattatccatcctatacagcctttggccaaaaccagtatgcacagtattattcagcatcaacgtatggagcgtatatgacatcgaataacacagccgatggcacaccctcttcaacctctacttatcagttgcaggaatctctcccaggactgactaaccaaccaggagagttcgataccatgcagagtccctccacacccatcaaagatcttgatgagagaacctgtaggagttctgggtcaaagtccagaggaagaggccggaaaaataatccctccccgcctcctgatagtgacctggagcgtgtgtttgtctgggatttggatgaaaccatcattgtttttcactcactgctcaccgggtcttatgcacagaagtatggcaaggatccccccatggctgtaacccttggactccgcatggaagaaatgatttttaatcttgctgatactcatttgttttttaatgatttagaggagtgtgatcaagttcatatagatgatgtttcctctgatgataatgggcaggacttaagtacctacagttttgcaactgatggcttccatgcagctgcaagtagtgcaaacctttgtttgccaacaggtgtaagaggaggggttgactggatgaggaagttggcttttcgttacagaagagtaaaagaattatataacacctacaagaacaacgttggaggactccttggccctgccaagagggatgcctggctacagttaagggcagagattgaaggtctgacagattcctggctaacaaatgcacttaagtctttatcaattattagcactaggagtaactgcataaatgtcttggtaacgacaactcaactgatcccagcacttgcgaaggttctactctatagtttaggaggtgctttccccattgagaatatttacagtgcaactaaaataggcaaggaaagctgttttgagcgtatagtgtccagatttggcactaacataacttatgttgtgattggagatggccgagatgaggagcatgccgctaaccagcacaacatgcccttctggaggatatccagtcactcagacctcctggctctccaccaagcactggaattagagtatttgtaa

SEQ ID NO: 48351 - DNA, 2156 bp, Homo Sapiens
gaggaagaaggcccctcggcctcagcagagcgctatcctccactggttccccgggttccccggcttgctaccgggctgctccgtgcatctttccccccaggcgtcaggaactgcgccctcatggcggaggtgaaggtgaaggtgcagccgcctgacgcggatccggtcgaaatagaaaacaggattatagaattatgtcaccagttccctcatggaatcacagaccaagtaattcagaatgaaatgcctcatatagaagcccagcagcgggcagtagccatcaataggttgttgtctatgggtcagttggatctcttaaggagcaatacgggccttttatatagaataaaggactctcagaatgctggtaaaatgaagggatccgataaccaagaaaaactagtatatcaaatcatagaggatgcaggaaataaaggaatatggagcagagatatccgctataaaagtaatttgccattaacagaaatcaacaaaattctgaagaatctggaaagtaaaaagcttatcaaagctgttaagtctgtagcagcctcaaaaaagaaggtgtatatgctctataacctgcagccagaccggtctgtgactggtggagcctggtacagtgaccaggattttgaatctgaatttgtagaggtgcttaaccaacagtgttttaaattcctacagtccaaggcagaaacagcacgagaaagcaaacagaacccaatgatacaaagaaatagttcatttgcctcatcacatgaagtgtggaaatatatctgcgaattgggaatcagtaaggtagagttatccatggaagacattgaaaccatcctgaatacactcatttatgatggaaaagtggagatgacgattattgctgcaaaagaaggcacagttggcagtgtagatggacacatgaaactgtacagggcagtcaatccaatcatccctcccacaggtttggtccgggcaccctgtggactctgcccggtttttgatgactgccacgaaggtggtgagatttcaccatctaactgtatttacatgacagagtggctcgaattttaatagagagctatgaactttattgacattttgcaaatgaagttacttagggagcagataatttaattcatgatggaacacgaaatctccttgaaagcaaacttcacaataatggacgtagacttgctgctatgaaaacatattttttttatttatgaagactaaatttatattggtaaaatagccagtagaatatgaaagaaataaggttagtagtgaaattcattcttcaataaataaaacactttgaaactccggaggaccacatctttcaagacttctgatgggtcaaggaaaaagatgccaacatacccgtatttaccaagtactatgataatggctagagtataaaaatgttctttttaaagttatttattaagttcttcattggaagtttttttttatatctggttcactaccaccattttctgtttcctactttctcagtggtttcattgaaaagaaattagaaggggttaaaggcaggaatagcaaagagtgcaaacttggggtatgactgggggagagtggaacatgccttttccgcacaatattaattcctttttgtatcagaaatgttcttttaggagattatgctaccatacttacttcaaacccaatgactactgtcaaggacatattttcagtacataaatactatcattttcattctaaagaatattttcactgttccttctttcttaaagtcttatgtttcactctttaactcaaatgtattctttgttagaatttaccctagattcttatttaatgtctgcagtagactgaatgtttgtgtgcccccagaattctaatgttgaaatctcatttccaatgtgatggtatttggaggtggggcttttggtaagtgataggtcaggagagtaacagcgctcatgaatgggattagtgcccttatataaagagacccagagagctccatcaccccttctgccatgtgaaagggagaagacaaacatccacgaaccaggaagtgggtcctcaccagaaaacaaatctgtaagcaccttgatcttggacttctcagcctccagaattgtgagaaataaatttctgttgttgataaa

SEQ ID NO: 48352 - DNA, 492 bp, Homo Sapiens
atttctcatgttatccggaccttgaagatggactgctctggggcccatgtgcaagtgacctgtgccaagctcatctccaggacaggccacctgatgaagcttctcagtgggcagcaggaagtaaaggcatctgagatagaatgggatacggaccaatggaagactgagaactacattaatgagagcacggaagcccagagtgaacagaaagagaagtcgcttgagctcacaaaagaagttccaggatacggctatactgacaaactcatcttggcattaattgtgactgaaatactaatgattttgattatacttttctgcctcattgtggtaaggacaataattaattcaggttttcagaatgcagtcctgtttttgtgtggattcagagctcacaaactgaaaaccaaagccactttcccacttgacatacttcttcagtcatttaaggctgagtgctttgttcttttattgcagtgtatatttcaggat

SEQ ID NO: 48353 - DNA, 1134 bp, Homo Sapiens
atgagagccaattgttccagcagctcagcctgccctgccaacagttcagaggaggagctgccagtgggactggaggtgcatggaaacctggagctcgttttcacagtggtgtccactgtgatgatggggctgctcatgttctctttgggatgttccgtggagatccggaagctgtggtcgcacatcaggagaccctggggcattgctgtgggactgctctgccagtttgggctcatgccttttacagcttatctcctggccattagcttttctctgaagccagtccaagctattgctgttctcatcatgggctgctgcccggggggcaccatctctaacattttcaccttctgggttgatggagatatggatctcagcatcagtatgacaacctgttccaccgtggccgccctgggaatgatgccactctgcatttatctctacacctggtcctggagtcttcagcagaatctcaccattccttatcagaacataggaattacccttgtgtgcctgaccattcctgtggcctttggtgtctatgtgaattacagatggccaaaacaatccaaaatcattctcaagattggggccgttgttggtggggtcctccttctggtggtcgcagttgctggtgtggtcctggcgaaaggatcttggaattcagacatcacccttctgaccatcagtttcatctttcctttgattggccatgtcacgggttttctgctggcactttttacccaccagtcttggcaaaggtgcaggacaatttccttagaaactggagctcagaatattcagatgtgcatcaccatgctccagttatctttcactgctgagcacttggtccagatgttgagtttcccactggcctatggactcttccagctgatagatggatttcttattgttgcagcatatcagacgtacaagaggagattgaagaacaaacatggaaaaaagaactcaggttgcacagaagtctgccatacgaggaaatcgacttcttccagagagaccaatgccttcttggaggtgaatgaagaaggtgccatcactcctgggccaccagggccaatggattgccacagggctctcgagccagttggccacatcacttcatgtgaatag

SEQ ID NO: 48354 - DNA, 156 bp, Homo Sapiens
atgtcttctcacaagactttcaagattaagcaattcctggccaagaaacaaaagcaaaatcgtcccattccccagtggattcggatgaaaactggtaataaaatcaggtacaactccaagaggagacattggaaaagaaccaagctaggtctgtaa

SEQ ID NO: 48355 - DNA, 1755 bp, Homo Sapiens
ggcggcgtaggggcggaggtcgcgcctgagtgcgtccgcacgagagggcggaaccgtctccatggcaacccgcgcgcagccggggccactcagccaggcgggaagcgctggtgttgcggcgctggcgacagtcggggttgcgagcggcccggggccggggcggccagggccgctgcaggacgagaccctgggtgtggcgtccgtgccctcgcagtggagggccgtccagggcatccgctgggagacgaaaagttgccagacggccagcattgccactgccagtgcatccgcccaggccaggaatcatgtggacgcccaggtgcagacggaggcccccgtgcctgtcagcgtgcagcccccgtcccagtatgacatacccaggctcgcagcctttcttcggagagtggaggccatggtcatccgagagctgaacaagaattggcagagccacgcgtttgatggcttcgaggtgaactggaccgagcagcagcagatggtgtcttgtctgtataccctgggctacccgccagcccaagcgcagggtctgcatgtgaccagcatctcctggaactccactggctctgtggtggcctgtgcctacggccggctggaccatggggactggagcacgcttaagtccttcgtgtgtgcctggaacctggaccggcgagacctgcgtccccagcagccgtcggccgtggtggaggtccccagcgctgtcctgtgtctggccttccaccccacgcagccctcccacgtcgcaggagggctgtacagtggtgaggtgttggtgtgggacctgagccgtcttgaggacccgctgctgtggcgcacaggcctgacggatgacacccacacagaccctgtgtcccaggtggtgtggctgcccgagcctgggcacagccaccgcttccaggtgctgagtgtggccaccgacgggaaggtgctactctggcagggcatcggggtaggccagctgcagctcacagagggcttcgccctggtcatgcagcagctgccacggagcaccaagctcaagaagcatccccgcggggagaccgaggtgggcgccacggcagtggccttctccagctttgaccctaggctgttcattctgggcacggaaggcggcttcccgctcaagtgttccctggcagctggagaggcagccctcacgcggatgcccagctccgtgcccctgcgggccccagcacagtttaccttctccccccacggcggtcccatctactctgtgagctgttcccccttccacaggaatctcttcctgagcgctgggactgacgggcatgtccacctgtactccatgctgcaggcccctcccttgacttcgctgcagctctccctcaagtatctgtttgctgtgcgctggtccccagtgcggcccttggtttttgcagctgcctctgggaaaggtgacgtgcagctgtttgatctccagaaaagctcccagaaacccacagttttgatcaagcaaacccaggatgaaagccctgtctactgtctggagttcaacagccagcagactcagctcttggctgcgggcgatgcccagggcacagtgaaggtgtggcagctgagcacagagttcacggaacaagggccccgggaagctgaggacctggactgcctggcagcagaggtggcggcctgaggggtcccgggaggcgggtgcaagccttcgctgtgccgagccttgtgtttctgacgcaagccaaatgaagaaaagcaaagctt

SEQ ID NO: 48356 - DNA, 882 bp, Homo Sapiens
caccaatcaatggtcacagaattcatcctggtgggattccagctcagtgctgagatggaagtgctcctcttttggagcttctcccttggaatagccttggaactcatctgtctggaccacagtctgcacacttcatacttcttcctctcacacctggccgtcattgacatgtcctatgcttccaacaatgttcccaagatgctggtggatcttgcgaacaaaaccatgtgcttttttccatgcataatgcagacattcttgtatttggcttttgctcacatagagtgtctgattttggtggttttgtcctatgatcgctatgtggccatctgccaccccttacgttacaatgtcctcatgagctggagagagtgcactgtcctggctgtggcttcctgggtgttcagcttcctcctggctctggtccatttagttctcattctgaggctgcccttcagtgggcatgaaatcaaccactactgtgaaatcctgtctgtcctcaagttggcctgtgctgacacctggctcaaccaggtggtcatctttgcagcctgcatgttcatcctggtagggtcactctgcctggtgctggtctcttacttgggcatcctggcggccatcctgaggatccagtctggcgagggccgcagaaaggccttctctacctgctcctcccacctctgtgtggtggagttcttctttggcaacgccattgtcatgtacatggcccccaagtcccgccatcccgaggagcagcagaaggtcctttccctgttttgcagcctttggaatcaggtgctgaaccctctgatctacagcttgaggaatgcagaggtcaagagtgcccagaagagggcactgaggaaggagaggctgatgtaa

SEQ ID NO: 48357 - DNA, 567 bp, Homo Sapiens
aggtcactggaaggactgagcgcattcaggagcctggaggaactcatcttggacaacaatcagctgggggacgaccttgtgttgccagggttacccagactgcataccttaaccctcaacaagaaccgaataaacctttgtcacatcactgatttggagaacctgctggatcacttggcagaagtgacaccagctctggagtacctcagtctgctgggcaacgtggcctgtcccaacgagctggtcagcttggaaaaggatgaggaagactacaagagatacagatgctttgttctgtacaagctgcccaacttgaaatttctggatgcccagaaagtaaccagacaagaacgagaggaggcgttggtcagaggagtcttcatgaaggtggtgaagcccaaggcttctagtgaggacgttgccagctccccggagcgccactacacgcccttgccttctgcttccagggaactcaccagtcaccaaggtgtcctggggaagtgtcgctacgtttactatgggaaaaactcagagggcaacaggtttatccgagatgaccagctctga

SEQ ID NO: 48358 - DNA, 1311 bp, Homo Sapiens
atggcctcggcgctgagctatgtctccaagttcaagtccttcgtgatcttgttcgtcaccccgctcctgctgctgccactcgtcattctgatgcccgccaaggtgtgtgtccagtacatgaaggacaccaacatgctgttcctgggcggcctcatcgtggccgtggctgtggagcgctggaacctgcacaagaggatcgccctgcgcacgctcctctgggtgggggccaagcctgcacggctgatgctgggcttcatgggcgtcacagccctcctgtccatgtggatcagtaacacggcaaccacggccatgatggtgcccatcgtggaggccatattgcagcagatggaagccacaagcgcagccaccgaggccggcctggagctggtggacaagggcaaggccaaggagctgccagggagtcaagtgatttttgaaggccccactctggggcagcaggaagaccaagagcggaagaggttgtgtaaggccatgaccctgtgcatctgctacgcggccagcatcgggggcaccgccaccctgaccgggacgggacccaacgtggtgctcctgggccagatgaacgagttgtttcctgacagcaaggacctcgtgaactttgcttcctggtttgcatttgcctttcccaacatgctggtgatgctgctgttcgcctggctgtggctccagtttgtttacatgagattcaattttaaaaagtcctggggctgcgggctagagagcaagaaaaacgagggctgccctcaaggtgctgcaggaggagtaccggaagctggggcccttgtccttcgcggagatcaacgtgctgatctgcttcttcctgctggtcatcctgtggttctcccgagaccccggcttcatgcccggctggctgactgttgcctgggtggagggcaaagttgtctccgatgccactgtggccatctttgtggccaccctgctaaggaaaactccattttatccccctcccctgctggattggaaggtaacccaggagaaagcctcggggctgtccgtgtggatggggaagcagatggagcccttgcacgcagtgcccccggcagccatcaccttgatcttgtccttgctcgttgccgtgttcacgcaaagcaacgtggccaccaccaccttgttcctgcccatctttgcctccatgtctcgctccatcggcctcaatccgctgtacatcatgctgccctgtaccctgagtgcctcctttgccttcatgttgcctgtggccacccctccaaatgccatcgtgttcacctatgggcacctcaaggttgctga

SEQ ID NO: 48359 - DNA, 3136 bp, Homo Sapiens
ccctgtgactcacagccctgcttccacggggggacctgccaggactgggcattgggcgggggcttcacctgcagctgcccggcaggcaggggaggcgccgtctgtgagaaggtgcttggcgcccctgtgccggccttcgagggccgctccttcctggccttccccactctccgcgcctaccacacgctgcgcctggcactggaattccgggcgctggagcctcaggggctgctgctgtacaatggcaacgcccggggcaaggacttcctggcattggcgctgctagatggccgcgtgcagctcaggtttgacacaggttcggggccggcggtgctgaccagtgccgtgccggtagagccgggccagtggcaccgcctggagctgtcccggcactggcgccggggcaccctctcggtggatggtgagacccctgttctgggcgagagtcccagtggcaccgacggcctcaacctggacacagacctctttgtgggcggcgtacccgaggaccaggctgccgtggcgctggagcggaccttcgtgggcgccggcctgagggggtgcatccgtttgctggacgtcaacaaccagcgcctggagcttggcattgggccgggggctgccacccgaggctctggcgtgggcaagtgcggggaccacccctgcctgcccaacccctgccatggcggggccccatgccagaacctggaggctggaaggttccattgccagtgcccgcccggccgcgtcggtgagggtggggccggggcggggggaagggccggcccccacctccgtctctcctgtggggaggggacagcaaagacacccccccatgaccccagggagaagatggcgctggaggtcgtgttcctggcacgaggccccagcggcctcctgctctacaacgggcagaagacggacggcaagggggacttcgtgtcgctggcactgcgggaccgccgcctggagttccgctacgacctgggcaagggggcagcggtcatcaggagcagggagccagtcaccctgggagcctggaccagggtctcactggagcgaaacggccgcaagggtgccctgcgtgtgggcgacggcccccgtgtgttgggggagtccccggttccgcacaccgtcctcaacctgaaggagccgctctacgtagggggcgctcccgacttcagcaagctggcccgtgctgctgccgtgtcctctggcttcgacggtgccatccagctggtctccctcggaggccgccagctgctgaccccggagcacgtgctgcggcaggtggacgtcacgtcctttgcaggtcacccctgcacccgggcctcaggccacccctgcctcaatggggcctcctgcgtcccgagggaggctgcctatgtgtgcctgtgtcccgggggattctcaggaccgcactgcgagaaggctggggcccttgtcctcccgcctcccccaccctgtcctgttgccaccttcctagaggccctgacctgccctctgccctccagcgagaaggcactgcagagcaaccactttgaactgagcctgcgcactgaggccacgcaggggctggtgctctggagtggcaaggccacggagcgggcagactatgtggcactggccattgtggacgggcacctgcaactgagctacaacctgggctcccagcccgtggtgctgcgttccaccgtgcccgtcaacaccaaccgctggttgcgggtcgtggcacatagggagcagagggaaggttccctgcaggtgggcaatgaggcccctgtgaccggctcctccccgctgggcgccacgcagctggacactgatggagccctgtggcttgggggcctgccggagctgcccgtgggcccagcactgcccaaggcctacggcacaggctttgtgggctgcttgcgggacgtggtggtgggccggcacccgctgcacctgctggaggacgccgtcaccaagccagagctgcggccctgccccaccccatgagctggcaccagagccccgtgcccgctgtaattattttctatttttgtaaacttgtcgctttttgatatgattttcttgcctgagtgttggccggagggactgctggcccggcctcccttccgtccaggcagccgtgctgcagacagacctagtgctgagggatggacaggcgaggtggcagcgtggagggctcggcgtggatggcagcctcaggacacacacccctgcctcaaggtgctgagcccccgccttgcactgcgcctgccccacggtgtccccgccgggaagcagccccggctcctgaatcaccctcgctccgtcaggcgggactcgtgtcccagagaggaaggggctgctgaggtctgatggggcccttcctccgggtgaccccacagggcctttccaagcccctatttgagctgctccttcctgtgtgtgctctggaccctgcctcggcctcctgcgccaatactgtgacttccaaacaatgttactgctgggcacagctctgcgttgctcccgtgctgcctgcgccagccccaggctgctgaggagcagaggccagaccagggccgatctgggtgtcctgaccctcagctggccctgcccagccaccctggacatgaccgtatccctctgccacaccccaggccctgcgaggggctatcgagaggagctcactgtgggatggggttgacctctgccgcctgcctgggtatctgggcctggccatggctgtgttcttcatgtgttgattttatttgacccctggagtggtgggtctcatctttcccatctcgcctgagagcggctgagggctgcctcactgcaaatcctccccacagcgtcagtgaaagtcgtccttgtctcagaatgaccaggggccagccagtgtctgaccaaggtcaaggggcaggtgcagaggtggcagggatggctccgaagccagaaatgccttaaactgcaacgtcccgtcccttccccacccccatcccatccccacccccagccccagcccagtcctcctaggagcaggacccgatgaagcgggcggcggtggggctgggtgccgtgttactaactctagtatgtttctgtgtcaatcgctgtgaaataaagtctgaaaactttaaaa

SEQ ID NO: 48360 - DNA, 264 bp, Homo Sapiens
atggacagaaaaaaaaataaaattcttttccatcattctattttcaaagaggtcttggcgttttcctacatcttttgtttagaggggaaaaagtttcatttgctgccatttcagaaaggttatgctatcctgttttatccaagcagttgtgagtcaggaactgcctgggcagtgtgcatcaactttgtggccgaaccattacagctgtcatatccttggctgatcgtctctcccagggactactgccctccacttagtgtctga

SEQ ID NO: 48361 - DNA, 954 bp, Homo Sapiens
ttgatcaggaaactttacatggcatctcccagcaatgactccactgccccagtctctgaattcctcctcatctgcttccccaacttccagagctggcagcactggttgtctctgcccctcagccttctcttcctcctggccatgggagctaacaccaccctcctgatcaccatccagctggaggcctctctgcaccagcccctgtactacctgctcagcctcctctccctgctggacatcgtgctctgcctcaccgtcatccccaaggtcctggccatcttctggtttgacctcaggtcgatcagcttcccagcctgcttcctccagatgttcatcatgaacagttttttgaccatggagtcctgcacgttcatggtcatggcctatgaccgttatgtggccatctgccatccattgagatacccgtctatcatcactgaccagtttgtggctagggccgtggtctttgttatagcccggaatgcctttgtttctcttcctgttcccatgctttctgccaggctcagatactgtgcaggaaacataatcaagaactgcatctgcagtaacctgtctgtgtccaaactctcttgtgatgacatcactttcaatcagctctaccagtttgtggcaggctggactctgttgggctctgatcttatccttattgttatctcctattcttttatattgaaagttgtgcttaggatcaaggccgagggtgctgtggccaaggccttgagcacgtgtggttcccacttcatcctcatcctcttcttcagcacagtcctgctggttctggtcatcactaacctggccaggaagagaattcctccagatgtccccatcctgctcaacatcctgcaccacctcattcccccagctctgaaccccattgtttatggtgtgagaaccaaggagatcaagcagggaatccaaaacctgctgaagagg

SEQ ID NO: 48362 - DNA, 983 bp, Homo Sapiens
gggaaggaagctgcatgcatgagacccacagactcttgcaagctggatgccctctgtggatgaaagatgtatcatggaatgaacccgagcaatggagatggatttctagagcagcagcagcagcagcagcaacctcagtccccccagagactcttggccgtgatcctgtggtttcagctggcgctgtgcttcggccctgcacagctcacgggcgggttcgatgaccttcaagtgtgtgctgaccccggcattcccgagaatggcttcaggacccccagcggaggggttttctttgaaggctctgtagcccgatttcactgccaagacggattcaagctgaagggcgctacaaagagactgtgtttgaagcattttaatggaaccctaggctggatcccaagtgataattccatctgtgtgcaagaagattgccgtatccctcaaatcgaagatgctgagattcataacaagacatatagacatggagagaagctaatcatcacttgtcatgaaggattcaagatccggtaccccgacctacacaatatggtttcattatgtcgcgatgatggaacgtggaataatctgcccatctgtcaaggctgcctgagacctctagcctcttctaatggctatgtaaacatctctgagctccagacctccttcccggtggggactgtgatctcctatcgctgctttcccggatttaaacttgatgggtctgcgtatcttgagtgcttacaaaaccttatctggtcgtccagcccaccccggtgccttgctctggaaggaggaagacctgaacatcttttccctgtcctttatttcccacacatcaggttggcagctgctgtgctttatttttgccctgtgttaaagtcctctcccaccccagcacctacctgttcctcaactagcaccaccacatctctgttctaaatgttgttctcctgcaataaaggacgtttgaattaaacattcca

SEQ ID NO: 48363 - DNA, 1473 bp, Homo Sapiens
atgcccggggccagggacgcgctctgtcaccaggcgctgcagctgctggccgagctctgtgcccgtggggccctggagcacgacagctgccaggatttcatttaccacctgcgggaccgtgccagaccccggctccgcgacccagatatctcagtgagcctgctgacccttgtggtcactgcctgtggtctcgctctctttggcgtgtctctcttcgtatcttggaaactctgctgggttccgtggcgagaacgaggcctgccctctggtagcaaagacaacaaccaggagccccttaactacatggacacagagaccaatgagcaggagaacagtgaggacttcctagatcctcccacgccctgccctgactcctccatgaagatcagccacacctcccctgacattcccctctccacccagacggggatccaggagaactgtgcccatggcgtccgcgtgcagcgccaagtcacagagccaacctcgtcggcccggcataattcaatccgaagacaactcaacttgtcaaacccggacttcaatatccagcagcttcaaaaacaggaacagttgactggaattggtagaattaaaccagagttatataagcagaggtcattggataatgatgacgggagacggagtaacagcaaggcttgtgggaaactgaacttcattttaaaatatgactgtgacttagagcagctcatagtgaagattcacaaagctgtcaatttgcccgccaaggacttttctgggacttcagatccttatgtcaagatctatttgcttcctgatcggaaaacaaaacaccagactaaagttcacagaaagaccctgaaccctgtgtttgatgaagtgtttttatttccggttccctacaatgaccttgaagcacggaagcttcacttctctgtgtacgactttgacaggttctctcgtcatgacttaatcggccaagtggtggtggatcacttcctagacttggctgatttccccagggagtgcatcctttggaaggatatcgaatatgtcaccaatgacaacgtggatctgggagagctgatgttttccctgtgctatcttccaacggctggcaggctgaccattaccattataaaagcaaggaatttaaaggcaatggacataacaggagcatcagatccctatgtgaaagtctcgctgatgtgtgatggcagacgactgaagaagaggaaaacatccaccaagaggaacaccttgaatcctgtttacaacgaagccatagtctttgatgtccctcccgagaacattgaccaaatccacttgtccatagcagtcatggactatgaccgtgtaggtcacaatgagatcatcggcgtgtgtcaagtaggcaacgaggctgagaggctgggcagagaccactggagtgaaatgttgtcatatcctcggaagcccattgcacactggcattccctggtggaggtaaga

SEQ ID NO: 48364 - DNA, 2950 bp, Homo Sapiens
tcggctcctgccgaggagcccaaggggtcccgggatccgccgcacaggctggcactgcttgaagaggaggctactcggagactgcgccgcgcggattggaggctccccaaatattttgtgatctgaggatccagctcaagtgaggtgccataggacgtgttcctgagtttgcattgcacggagaccttcctggaatttttcatttgcaagtcggcttaaccaattttgcattgagtcctaggctgcttgcactctgaatttgggctattcaggtagtgtgctcaaagttgaaaccgcatacagcacaactcaagtttgcatcagactgggaagcgaacttaagccagcggtgcgtggcccaggagtgggaaaggaaatggatgcctgaagtggaagaggtggtgcagagggggcaccgcccatgctgccctgcttccaactgctgcgcatagggggcggcaggggcggtgatctctacaccttccacccccccgccggggctggctgcacctatcgcttgggccacagggccgacctgtgtgatgtggccctgcggccccagcaggagcctggcctcatctctgggatccacgccgaactgcatgccgagccccggggtgatgactggagggtcagcctggaagaccacagcagccaaggtactttggtcaataatgtccgactcccaagaggtcacaggctggaattgagtgatggagacctcctgacctttggccctgaagggtccccaggaaccagcccctcggagttctacttcatgttccaacaagtacgagtcaagcctcaggactttgctgccattaccatcccacggtctaggggagaagcccgggttggggctggtttccggcctatgctgccctcccagggggctccacagcggcctctcagcaccttctcccctgcccccaaggccacactgatcctaaactccataggcagcctcagcaagctccggccccagcccctcaccttctcccctagttggggtggaccaaagagcctgcctgttcccgccccacctggggaagtggggaccacgccttctgctccaccccaacgcaatcggaggaaatctgttcaccgagtgttggcggaactggatgatgagagtgagcctcctgagaacccgccaccggtccttatggagcccaggaagaaactccgtgtagacaaagccccactgactcccactggaaatcgacgtggccgtcctcggaagtacccagtgagcgctcccatggctccccctgcagttggggggagccctgtgcagctccttgttgctgcctgccccaggaagagacagtggcctgggttcagtgtgatggctgtgacgtctggttccatgtggcctgtgttggctgcagcatccaggctgccagggaggccgacttccgatgcccagggtgccgggctggcattcctaaggtccaccgccaaggcaccatcggacacacctgcccatgagtagacacagcagcgagcaaataggtctgataaataccccccttcccttccctccccaagagggaatgactacagggaagaaggatggattgatgtggactcattcagggcctggagcagaccctggtggccaagacagaagagatggtttcctgccaaagatattgccacctccaggaaattgccagtgagctggaagttcccactattacaagccataaggccatgttgccatggacaccagaatatctgtagtcagagcacctatcagttgcaaaagccatgcctgcaaccgatggaaaatgtaagagggagttcttaaggttcttggtggcatcacccaaggcattctgggaaaacctagggcctggccccaaaacttccctactctgtggctagtcctgctgccaacaaaatcgtagcgacctggcttttcacagctttgcttttatttccaagtcaaggacaagccgcttcattcactcctgggcatttactcttcttgtgggtctgtgatattccttgctttccagggagaatgtgcttggcaaggtctggagaactaattcagaatcttaggggaaggggagagatggaaatacaaacctgcttactggaaaggtgcaaatatatgggttgagctggaggtaggaatacaggtaattaaggtttctagtttaagggaaaacagatctattgccatttaaataaggtaactgggatttggttaagttcacaaagatagcagaagatttatttacaggcttcacctgtactgtcagggcaagagaaagcctggtaaaccagctacagcagtttaccagtgtgatggctgtgacacagctccactccacgggtggacacagcagagggcaactgggctggcctggttcagtgtgaatcaaaccgcttaacccacacatggtacatgtgattttcttttgtgagccttacaccaagccaaactattgtcaaagcatcatttctatagaaataaagccttatcttgacctgttctattaaaacctgccacatccgccctttcctacctagatttaatgagcccaagtttttttacatggaagaaatgactctggggcaaagacccctaatgaactagtggcagagccaggaataaaacttgagtaactaatgagtcacttatgggcagagtatgcaaaaaccttaagtggaaaccaaatagaccctggtatcaagaaagcacaaagtattaatagaagtttctggttggggtgatctaggttcaacagaaataagatgatttctaagtataaagccatttaagaattccagagtagggtgggaaagcaaaaagccagctctgaacaggtaacagctacatggtgactgagtctatgggcaaaagttcttgcatcacaggcttttgggaactagcctatcacagggccctgtacaaataaacttggctgcaatccca

SEQ ID NO: 48365 - DNA, 438 bp, Homo Sapiens
atggcagaagtagagcagaagaagaagcggaccttccgcaagttcacctaccgcggcgtggacctggaccagctgctggacatgtcctacgaacagctgatgcagctgtacagtgcgcgccagcggcggcggctgaaccggggcctgcggcggaagcggcactacctgctgaagcgcctgcgcaaggccaagaaggaggcgccgcccatggagaagccggaagtggtgaagacgcacctgagggacgtgatcatcctgcccgaggtggtgggcagcatggtgggcgtccacaacggcaagaccttcaaccaggtggaggtcaagcccgagatgattggccactacctgggcgagttctccatcacctacaagcccgtaaagcaatgccggtccggcatcggcgccacccactccttctgcttcatccctctcaagtag

SEQ ID NO: 48366 - DNA, 414 bp, Homo Sapiens
cttaggactcagaggagagaggagtgtggtctacactgcacatctctgccaagcctggcacgggatttgaagttccacaccactgagccaaacacatccaggtctgcttttttaaacaggaagttgtgtttggctgcggacaaactctctcagtgcccctgggacttacaagatgtttggaatgaggaacggcagctctcccaatgcgagctcagcggaggcccccagaaaaacgtggggaggagagttttccccataagacagactgtccttcagccccggccaccaaagaggagtaacccgggcctgctgttctctgggactgaatgcggctgcatccttcccttcctctgcttcctgtcccggtacttactgacggtgcacatgcggggcttggggaagctgagtgtctaa

SEQ ID NO: 48367 - DNA, 645 bp, Homo Sapiens
atgaagctgaatctggtgcagatctttttcatgttgctgatgctgctgctgggcctggggatgggcctggggttgggacttcatatggctacagcagtcttggaggagagtgatcaaccgctcaatgaattttggtccagtgactcacaggacaaagctgaggccactgaggagggagacggcacccaaaccacagaaacgctggtgcttagcaacaaagaagtggtgcaacctggctggccagaagatcccatcctcggtgaagatgaggttgggggtaacaagatgctcagagcctcagctctctttcagagcaacaaagactatcttaggcttgaccagacagatagagaatgcaatgatatgatggcacacaagatgaaggagcccagtcagagttgcatagcccagtatgcattcatccatgaggatctaaacacagtcaaagctgtctgtaacagtcctgtcattgcctgtgagctcaaggggggaaaatgtcacaaaagctcccgaccttttgatttgacattgtgcgagctgtcccaaccagaccaggtcactcctaactgcaattacctaacttctgttataaaaaagcacattattataacctgtaatgacatgaagcgccagttaccaactgga

SEQ ID NO: 48368 - DNA, 444 bp, Homo Sapiens
gtggccctgtcgggccacctttctggagtatttcccatgacagagaaagaaaagctgatcgctcgcctgaatgaccttggcactcagcttaaccgcgaggtcagcaccagcggcacgagccaggaacttacgatgcgtattgctgagctggaagaggagctggatggtgatgccagttcgattgacggtgaaaacggagagaagaatgctcccgacagcaccgacagcaccgacagcaccgacagcgatgtagatggcacggaaaaagtaaaaaccgaagcggtcacaacggatgaccgggtatcagtagaaacgctggtgaccttgcacataaacgcgcttcacgccacgcgtaacgagtctgtgtctattgtcaagcctggtgtcgttatccgcgtgactgacgtagaggctaacgacctgatatctcgggcgctggcccgg

SEQ ID NO: 48369 - DNA, 501 bp, Homo Sapiens
atgaaagacttgctgttgttaggatccccattccaaaggttcccggtccccgccccctttgtgacctcatacaaaggcttggcttatattgcaaagtttgggatccacagtctacaaaaccccacagctcctgagaattctctcgcctgcctttggcccttaggctctggtagattgcaaataacatgctttctttctgttcccgggtggcttcggacccctgtcggatcggaaatcccaaggaggcgtcggaccccgtccgatagtaaatcccaagtaaggtacctgccgtcggcagatttgagctttctgcctggacacctaatacccacagtcctccagtcaatcccaattaaggtacccgccgtcggcagatttgagctttcttcttggacacctaatacccacagtcctccaggctctggtagattgcaaatgacctgcttactttctgttcccgggctgcgttctgacacctgttggacagtaaatcccaagtaa

SEQ ID NO: 48370 - DNA, 648 bp, Homo Sapiens
atattagaaatttcgttcacaaccgtcagtatacccaagtttctgggtaacattatttcaggagataaaaccatttcctttaataattgcatagttcagttatttttcttcattctcttgggagtcacagagttttaccttctggctgccatgtcctatgaccgctatgtggccatctgcaagcctctgcattgcttgagtatcatgaatcgaagagtctgcacactgcttgtttttacttcttggctggtttcattcttaatcatattcccagcactcatgttgcttttaaagcttcattactgtaggtctaatattattgaccattttacctgtgattattttccactgctgcaacttgcttgttcagacacaaaattcttagaggtgatgggattttcttgtgctgcgtttactctaatgttcactttggcattaatatttctgtcctacatatacattatcagaacaattttgagaattccttctactagtcagaggacaaaggccttttccacatgttcttcccacatggttgttgtctccatctcttatggcagctgcatttttatgtacattaaaccctcagcaaaagatagagtgtccttgagcaagggagtggcaatactaaacacctcagtagccccc

SEQ ID NO: 48371 - DNA, 570 bp, Homo Sapiens
gtgatggcacagatcctgaaggatatgggaatcacagagtatgaaccaagggttataaatcaaatgttggaatttgctttccgttatgtgactacaattctggatgatgcaaaaatttattcgagccatgctaagaaacctaatgttgatgcagatgatgtgagactggcaatccagtgtcgtgctgaccaatcttttacctctcctcccccaagagatggacctaaccaagggagactagttccacgattaagtgttggtgctgttagtagcaaacctactactcctactatagcaaccccacaaacggtgtctgtcccaaataaagttgcaactccaatgtcagtgacaagccaaagatttacggtgcagattccaccttctcagtccacacctgtcaaaccagttcctgcaacaactgcagttcaaaatgttctgattaatccttcaatgattgggcccaaaaatattcttattaccaccaacatggtttcgtcacagaacacagccaatgaagcaaacccactgaagagaaaacatgaagatgatgatgacaatgatattatgtaa

SEQ ID NO: 48372 - DNA, 1164 bp, Homo Sapiens
atgaatcggcaccatctgcaggatcactttctggaaatagacaagaagaactgctgtgtgttccgagatgacttcattgccaaggtgttgccgccggtgttggggctggagtttatctttgggcttctgggcaatggccttgccctgtggattttctgtttccacctcaagtcctggaaatccagccggattttcctgttcaacctggcagtagctgactttctactgatcatctgcctgccgttcgtgatggactactatgtgcggcgttcagactggaagtttggggacatcccttgccggctggtgctcttcatgtttgccatgaaccgccagggcagcatcatattcctcacggtggtggcggtagacaggtatttccgggtggtccatccccaccacgccctgaacaagatctccaattggacagcagccatcatctcttgccttctgtggggcatcactgttggcctaacagtccacctcctgaagaagaagttgctgatccagaatggcactgcaaatgtgtgcatcagcttcagcatctgccataccttccggtggcacgaagctatgttcctcctggagttcttcctgcccctgggcatcatcctgttctgctcagccagaattatctggagcctgcggcagagacaaatggaccggcatgccaagatcaagagagccatcaccttcatcatggtggtggccatcgtctttgtcatctgcttccttcccagcgtggttgtgcggatccacatcttctggctcctgcacacttcgggcacgcagaattgtgaagtgtaccgctcggtggacctggcgttctttatcactctcagcttcacctacatgaacagcatgctggaccccgtggtgtactacttctccagcccatcctttcccaacttcttctccactttgatcaaccgctgcctccagaggaagataacaggtgagccagataataaccgcagcacgagcgtcgagctcacaggggaccccaacaaaaccagaggcgctccagaggcgttaatcgccaactccggtgagccatggagcccctcttatctgggcccaacctcaaataaccattccaagaagggacattgtcaccaagaaccagcatctctggagaaacagttgggctgttgcatcgagtaa

SEQ ID NO: 48373 - DNA, 916 bp, Homo Sapiens
ggctttaacagtacgtgggcggccggaatccgggagtccggtgacccgggctgtggtctagcataaaggcggagcccagaagaaggggcggggtatgggagaagcctccccacctgcccccgcaaggcggcatctgctggtcctgctgctgctcctctctaccctggtgatcccctccgctgcagctcctatccatgatgctgacgcccaagagagctccttgggtctcacaggcctccagagcctactccaaggcttcagccgacttttcctgaaaggtaacctgcttcggggcatagacagcttattctctgcccccatggacttccggggcctccctgggaactaccacaaagaggagaaccaggagcaccagctggggaacaacaccctctccagccacctccagatcgacaagatgaccgacaacaagacaggagaggtgctgatctccgagaatgtggtggcatccattcaaccagcggaggggagcttcgagggtgatttgaaggtacccaggatggaggagaaggaggccctggtacccatccagaaggccacggacagcttccacacagaactccatccccgggtggccttctggatcattaagctgccacggcggaggtcccaccaggatgccctggagggcggccactggctcagcgagaagcgacaccgcctgcaggccatccgggatggactccgcaaggggacccacaaggacgtcctagaagaggggaccgagagctcctcccactccaggctgtccccccgaaagacccacttactgtacatcctcaggccctctcggcagctgtaggggtggggaccggggagcacctgcctgtagcccccatcagaccctgccccaagcaccatatggaaataaagttctttcttacatctaacaaca

SEQ ID NO: 48374 - DNA, 389 bp, Homo Sapiens
ctggactgagtggcaggccatcctacaaacacccgcacactcgacatcagtggtgtcaagacaactctaagaaggttttccgtgatcctgcaagacctgtgtcccatcctggtgattctgtcttcaacttcactgcacaggtaccacagtaagccagtgctgtgtgctctgagttccagggcatcccccagctcagccactacactgagcacaaggactctgacaaggccatctcggactgcagaccctcacggccttcccacactttgtcctcacttgcaacaggggcttcgggtgggcctcccgtttctaaagcacccactatggatgcacagcaggacagacccaagtcccaagactgcctgggcctactggcccccctagcatct

SEQ ID NO: 48375 - DNA, 285 bp, Homo Sapiens
cttgccaccagtcctgtttcagatgtgcagggaaaagcccacataactgcacagactgtgggccttcccatgtgctgttggatgggcagtgcctctcccagtgcccagatggctactttcaccaggaaggtagttgcacagagtgtcacccaacctgcaggcagtgtcatgggccgttggagtctgactgcatctcctgttaccctcacatctctcttaccaatggtaactgcaggaccagctgcagggaagagcagttcctcaacctcgtgggatactgtgctg

SEQ ID NO: 48376 - DNA, 909 bp, Homo Sapiens
atgattctattgaataattctgagcagctgctggccctattcaaatctttagcaaggagcattcctgagtccctgaaggtgtatggctctctgtttcacatcaatcacgggaaccccttcaacatggaggtgttggtggactcctggcccgggtatcagatggttattatccgacctcaaaaacaggagatgactgatgacatggattcatacactaatgtatatcgtatattctccaaagaccctcaaaaatcacaagaagttttgaaaaattctgagatcataaactggaaacagaaactccaaatccaaggttttcaagaaagtttaggtgaggggataaaagcagctgcattttcaaattcagtgaaggtagagcattcgagagcactcctctttgttacggaagatatcctgaagctctatgccaccaataaaagcaagcttggaagctgggctgagacaggccacccagatgacgaattggagagcgagactcccaattttaagtatgcccagctgaatgtgtcttattctgggctggtaaatgacaactggaagctagggatgaataagaggagcctgcattacatcaagcgctgcctaggagccctgccagcagtctgtatgctgggcccagagggggtcccggtctcatgggtaaccatggacccttcttgtgaaataggaatgggctacagtgtggaaaaataccgaaggagaggcaacgcgacacggatgatggtgcgatacatgaagtatctgtgtcagaagaatattccattttacggctctgtgctggaagaaaatcaaggcgccatcagaatgaataaggcactaggtttccttgaggcctcctgtcagtggcaccaatggacctgctacccacagaatcttgttccgttgtag

SEQ ID NO: 48377 - DNA, 378 bp, Homo Sapiens
atgccggagccatcgcgggcggctccggcttctaaaaagggctccaagaaggccattaccaaggcgcagaagaaggacggcaagaagcgcaagcgcggccgcaaggagagctattctatctacgtgtacaaggtgctgaagcaggtgcaccccgacaccggcatctcgtccaaggccatgggcatcatgaactccttcgtcaatgacatcttcgagcgcatcgccagcgaggcctcccgcctggcgcactacaagcgctccaccatcacgtcccgcgaagtgcagacggccgtgcgcctgctgctgcccggcgagctggccaagcacgccgtgtccgagggcactaaggctgtcaccaagtacaccagctccaagtga

SEQ ID NO: 48378 - DNA, 523 bp, Homo Sapiens
cgcgaaaggaaagaggtcgggagcgctcgcgagatctcggaccacccaacctgaaaggtgcttaggaagttgaaaggcccagaggaggcctccgggcaaatggccggagctggaccgaccatgctgctacgagaagagaatggctgttgcagtcggcgtcagagcagctccagtgctggggattcggacggagagcgcgaggactcggcggctgagcgcgcccgacagcagctagaggcgctgctcaacaagactatgcgcattcgcatgacagatggacggacactggtcggctgcttcctctgcactgaccgtgactgcaatgtcatcctgggctcggcgcaggagttcctcaagccgtcggattccttctctgccggggagccccgtgtgctgggcctggccatggtacccggacaccacatcgtttccattgaggtgcagagggagagtctgaccgggcctccgtatctctgaccacgatggcgcttacctttcagacttcattaaacttatgaccgaa

SEQ ID NO: 48379 - DNA, 5064 bp, Homo Sapiens
gtccctaacggtcttcggaagcgaagcagtgtcaacagtccctggtaaacacaagtagtattacaagtcgggagctcttcaagtcttggatgagactgtagagcggtcttgtgcggcaatgtgctaccttaaaataaataaataaataaacccctgttatgtccggagtttgtttccacccggagaggaatggaagagcaccagagagcgcttagctttctggttggatgttttgggctctgaggtcagcttggagaagaaaaaaaagattaagatgccagtgaagagacttcgtgaggtagtttctcaaaatcatggagatcatttggttttgctgaaagatgagttgccctgtgttcctccggcattgtctgcaaataaacgtcttcctgttggaacggggactagtttgaatggaacatcacgtggttcatcagacttaacttctgctagaaattgttaccagcctctattagaaaatcccatggtgtcagaaagtgatttttctaaagacgttgcagtgcaagtgttgcctttggataaaatagaagagaacaacaagcaaaaagcaaatgacatcttcatttctcagtatacaatgggacagaaagatgctctaagaacagttttaaagcaaaaagctcaaagcatgcctgtttttaaggaagtaaaggtacatctgttagaagatgcaggcatagagaaggatgctgttactcaggagactagaatttcacccagtggaattgattcagctacaaccgtggctgcagcaactgctgctgccattgcaaccgcagctccgttgataaaggtgcagagtgatttggaagcaaaagtcaattctgttacagaattacttagtaaattacaggagactgataaacacctgcaacgtgttacagagcagcaaacaagcattcagaggaaacaagagaaattacattgtcatgatcacgaaaagcaaatgaatgtgtttatggagcagcacataaggcatcttgaaaagttacaacaacaacaaatagatattcagactcattttattagtgctgcactcaagactagtagttttcagcctgttagtatgccctcctccagagcagtggaaaagtattccgtaaaaccagaacaccctaatcttggtagctgtaatccatctttatataacacatttgcttccaaacaagcacctttaaaagaagttgaagatacgagttttgataaacagaaatctcctttggagacaccagcacctcgcagatttgctcctgtacctgtttcaagggatgatgaactatcaaagagggaaaatcttttggaagaaaaagaaaatatggaagtgtcgtgtcacagaggaaatgtaagactattggaacaaattttgaataataatgattctttgacaagaaaaagtgaatcatcaaacaccacctcactaactaggtcaaaaataggatggactcctgagaaaacaaacagatttccttcctgtgaagagctagaaacaactaaagtgactatgcagaagtctgatgatgttcttcatgaccttggccaaaaagagaaagaaacaaatagcatggtccagccaaaagaatctctgagtatgttgaagcttccagatcttccacagaattctgttaagcttcaaacaaccaatacaacaagatctgtattgaaagatgctgagaagattttgagaggagtacaaaacaataaaaaagtacttgaagaaaacctggaagctattattcgtgcaaaagatggagctgccatgtattcgcttatcaatgctttatctaccaacagagagatgtcagagaaaattaggatcagaaagacagtggatgaatggattaaaactatttctgcagaaattcaggatgaactgtcaagaacagattatgaacaaaaaagatttgatcagaagaatcagagaaccaagaaaggtcagaatatgactaaagatattagaaccaacacacaagataaaactgtcaacaaatctgtaattccaagaaaacattctcaaaagcaaatagaagagcattttagaaatctacctatgaggggcatgcctgcttcaagtttacagaaagagagaaaggaagggcttttgaaagcaaccacagtaatacaagatgaagattatatgttacaagtctatggaaagccagtttatcagggccatcgaagcactcttaaaaaaggaccatatctcagatttaattctccatctcctaagtccagaccacagagaccaaaagtaatagaacgagttaaaggcactaaggtaaagtcaataagaacacagactgacttctatgcaacaaaacctaagaagatggattctaaaatgaaacattctgttcctgtgttacctcatggcgatcagcaatatttgttcagcccaagtagagaaatgcctactttttcaggtacattggaaggtcatctgattcctatggcaattcttttaggacaaacccaaagtaatagtgataccatgccacctgctggagtgattgtcagcaagccacaccctgtaactgtgactacttctattcctccatcatctcgaaaagtagaaactggagtaaagaaacctaacatagccattgtagaaatgaagtcagaaaaaaaggatcctcctcagcttactgtgcaggtattacccagtgtagatattgacagcatttcaaatagtagtgctgatgtcctttcacctctgtctagccccaaagaagcatctcttcctcctgtgcaaacttggataaagactccagaaattatgaaggtagatgaagaagaggtgaagtttccaggaactaactttgatgaaataatcgatgtcatacaggaagaagaaaaatgtgatgaaattccagactctgaaccaattctggagtttaacagaagtgttaaagctgattctacaaaatataatggtcctccatttccgccagttgcttctacttttcagcccactgctgatattctggataaagtaattgagagaaaagaaacactggaaaatagcttaattcaatgggtagagcaagaaataatgtcaagaattatctctgggctctttccagtccagcaacagattgcacctagtatcagtgtttcagtcagtgagacaagtgaaccactgacttctgacattgtggaaggaacaagcagtggcgccctccagctttttgttgatgctggtgttcctgtgaactcaaatgtgattaaacattttgttaacgaagctcttgctgagaccattgctgtcatgctgggtgacagagaagcaaagaagcaaggtcctgttgctacaggtgtttctggggatgcttcaacaaatgaaacatatttgccggcaagagtgtgcaccccactgcctaccccacagcctacgcctccttgctcaccttcatcacctgctaaggagtgtgttttggtaaagactccagattcttctccctgtgattcggatcatgatatggcttttcctgtgaaagaaatatgtgctgaaaaaggagatgatatgcctgccatcatgcttgttaatactccaacagttacccctactactacacctcctccagcggcggcagtttttaccccaactttgtcagatatttccattgataaattgaaggtatcaagcccagagcttcccaagccatggggtgatggagacctgccactggaagaagagaaccctaactcacctcaagaagaacttcatccaagagctattgtaatgtctgtggctaaggatgaagaaccagagagtatggatttccctgctcagcctccacctccagagccagttccctttatgccatttcctgccggcaccaaggccccttccccctcacagatgccaggttctgattcatcaacactggagagcacattgagtgttactgtcactgaaactgaaactttagataaacccatctctgaaggagagattttatttagctgtggtcaaaaattggcccccaagattttagaagatataggactgtacctgacaaaccttaatgatagcttatccagcactctgcatgatgccgttgaaatggaggatgatcctcctagtgaagggcaagtgattaggatgtcccataaaaaatttcatgcagatgcaattctttcttttgctaaacaaaaccaggagtcagcagtttcccagcaagcagtctatcattcagaggacttggaaaacagtgtgggtgaacttagtgaaggacaaagaccccagctaacagcggcagcagagaacatcttaatgggacattctctctatatgcagccacctgtcactaatacacagtctttggatcaacaatgtgatcctaaaccattatctcggcaatttgacacagtttcaggtagtatttatgaagattcatgtgctagtcatggtccaatgagtttgggagaattggagttggagccaaattctaagctggttcttcccacaacacttctgacagcacaagaaaatgatgttaatttaccagtagccgctgaagatttttcccagtaccaactaaagcaaaatcaggatgttaagcaagttgaacacaaaccatcacaaagttacctacgtgttagaaataaatctgatattgcaccttcacagcaacaagtttcaccaggtgatatggatcggacacaaattgagcttaatccgtacctcacatgtgtattttcaggtgggaaagcagtgccactctccgcttcacagatgccccctgccaagatgtcagtgatgctgccgtcagtgaacctcgaggactgctctcagtctctgagtctcagcacaatgcaggaggacatggagtcttcgggggcagataccttctgaacgggaagagacagccagcacagtgtttatgccactggttttaaagtcattttaccttggcttaaaaccctctctcagactgtttggtttttgagcatattctgaaaaaaaaattccaatattttaaaataaaacaaaaagcataatttgggtatttaaagtttttaaataaaataagtataagtcat

SEQ ID NO: 48380 - DNA, 327 bp, Homo Sapiens
cttcgaggctcccgtaggcgccatgccaacagcggcggagatatcttcggggacagctttgccgcctatttcccccgggtgctgaagcaggttcaccaggccctcagcctttcccaggaggccgtgagtgtcatggattctatggttcgtgacatactggaccgcatcgccaccgaggctggtcacctggcccactactccaagtgcgtgaccatcacctcccgggacattcggatggccgtgtgcctgctgctgccggggaagatgggcaagctcgctgagtctcagggcacgaatgccaccctcaggtacaccaaaagcaagtga

SEQ ID NO: 48381 - DNA, 447 bp, Homo Sapiens
atggcagagagccgccaggacctggaggaggagtatgagcctcagttcctgcggctcctagagaggaaagaagctgggaccaaagctctgcagagaacccaggctgagatccaggaaatgaaggaggctctgagacccctgcaagcagaggcccggcagctccgcctgcaaaacaggaacctggaggaccagatcgcacttgtgaggcaaaaacgagatgaagaggtgcagcagtacagggaacagctggaggaaatggaagaacgccagaggcagttaagaaatggggtgcaactccagcaacagaagaacaaagagatggaacagctaaggctcagtcttgctgaagagctctctacttataaggctatgctactacccaagagcctggaacaggctgatgctcccacttctcaggcaggtggaatggagacacagtctcaaggt

SEQ ID NO: 48382 - DNA, 1527 bp, Homo Sapiens
ggaggatgccacagccgcctgccagctccggtctgcaccatgagtgatgagcggcggctgcctggcagtgcagtgggctggctggtatgtgggggcctctccctgctggccaatgcctggggcatcctcagcgttggcgccaagcagaagaagtggaagcccttggagttcctgctgtgtacactcgcggccacccacatgctaaatgtggccgtgcccatcgccacctactccgtggtgcagctgcggcggcagcgccccgacttcgagtggaatgagggtctctgcaaggtcttcgtgtccaccttctacaccctcaccctggccacctgtttctctgtcacctccctctcctaccaccgcatgtggatggtctgctggcctgtcaactaccggctgagcaatgccaagaagcaggcggtgcacacagtcatgggtatctggatggtgtccttcatcctgtcggccctgcctgccgttggctggcacgacaccagcgagcgcttctacacccatggctgccgcttcatcgtggctgagatcggcctgggctttggcgtctgcttcctgctgctggtgggcggcagcgtggccatgggcgtgatctgcacagccatcgccctcttccagacgctggccgtgcaggtggggcgccaggccgaccgccgcgccttcaccgtgcccaccatcgtggtggaggacgcgcagggcaagcggcgctcctccatcgatggctcggagcccgccaaaacctctctgcagaccacgggcctcgtgaccaccatagtcttcatctacgactgcctcatgggcttccctgtgctggtggtgagcttcagcagcctgcgggccgacgcctcagcgccctggatggcactctgcgtgctgtggtgctccgtggcccaggccctgctgctgcctgtgttcctctgggcctgcgaccgctaccgggctgacctcaaagctgtccgggagaagtgcatggccctcatggccaacgacgaggagtcagacgatgagaccagcctggaaggtggcatctccccggacctggtgttggagcgctccctggactatggctatggaggtgattttgtggccctagataggatggccaagtatgagatctccgccctggaggggggcctgccccagctctacccactgcggcccttgcaggaggacaagatgcaatacctgtggagaagggtttgtccccgtttcccaggagggcagctcggggtaaaagccagccgcgtccaggtcccgcccacgcggcgcttctcccacgacgatgcggacgtgtgggccgccgtcccgctgcccgccttcctgccgcgctggggctccggcgaggacctggccgccctggcgcacctggtgctgcctgccgggcccgagcggcgccgcgccagcctcctggccttcgcggaggacgcaccaccgtcccgcgcgcgccgccgctcggccgagagcctgctgtcgctgcggccctcggccctggatagcggcccgcggggagcccgc

SEQ ID NO: 48383 - DNA, 594 bp, Homo Sapiens
cacccgcagcatcgtgtttcaagtcaggcagaagatacttccagcagctttgacaacctttttattgacaggttacagaggatcaccattgcggaccaaggtgaacaacagtcagaagaaaacgcaagtactaagaacttgacaggcctttctagtgggactcagaagaaacctcattatatggaagtgctagaaatgcgagccaaaaacccagggccccagctgcgtaaatttaaaaccaatgtgttaccttttcgacaaaatgattcatctagtcattgccagaagagtgggtctcctatttcctcaaaagagcggcggcgcagggataagcagcatcttgatgacatcacagcagctcggcttctaccacttcaccatatgcccacgcagctgctctccatagaagaatccttggcacttcagaaacagcagaaacagaattatgaggagatgcaagcaaagctcgcagcgcaaaaattagctgaaagaccgaatattaaaatgcggagttataatccagaaggggagtcttcagggagataccgagaagtaagggatgaagatgacgattggtcctctgatgaattctga

SEQ ID NO: 48384 - DNA, 939 bp, Homo Sapiens
tattctagatacggctttggaaaatcatttaattctttgtggatgcacggtctcctcccaccacattcctctcttccatggatgaggccaagagaacatgaaactcaacagtatgaatattctttgcctgtgcatcccccacctctcccatcacagccatccttgaagcctcaacagccaggactgaaaccttttctccagtctgctgctgcaaccaccaaccaggccacagcactgaaagaagcacttcagcctccaattcacctgggacatctgcccttgcaggaaggagaactgcctctggttcagcagcaggtggcaccatcagataagccaccaaagcctgagaatgcccctgccagacttggcatcatgagttcagaagaagtggcaggcgggagagaagacccaatggcctatggagccatgtttccaggatttggaggcatgaggcccggctttgagggaatgccccacaacccagctatgggcggtgacttcactctggaatttgactccccagtggctgccaccaaaggccctgagaacgaagaaggaggtgcacaaggctcccctatgccggaggccaacccagacaatctagaaaacccagctttccttacagagctagaacctgctccccacgcagggctccttgctctccctaaggatgacattcccggcctgccaaggagcccttcagggaagatgaagggactccccagcgtcaccccagcagctgctgacccactgatgacccctgaattagctgatgtttataggacctacgatgctgacatgaccacatccgtggatttccaggaagaagcaaccatggataccacgatggccccaaactctctgcaaacatccatgccaggaaacaaagcccaggagcccgagatgatgcatgacgcatggcatttccaagagccctga

SEQ ID NO: 48385 - DNA, 545 bp, Homo Sapiens
gagaggggtatacacagggaggccaggcagcctggagttagtcgaccgttgcgagacgttgagctgcggcagatgagtccaaagccgagagcctcgggacctccggccaaggccaaggagacaggaaagaggaagtcctcctctcagccgagccccagtggcccgaagaagaagactaccaaggtggccgagaagggagaagcagttcgtggagggagacgcgggaagaaaggggctgcgacaaagatggcggccgtgacggcacctgaggcggagagcgggccagcggcacccggccccagcgaccagcccagccaggagctccctcagcacgagctgccgccggaggagccagtgagcgaggggacccagcacgaccccctgagtcaggagagcgagctggaggaaccactgagtaaggggcgcccatctactcccctatctccctgagcagcaactaagtttaggcccagctgccagacctcagagatctcaccagcagggtgcttcccatgttgatgacaataaaatgaatgtgttgcaaa

SEQ ID NO: 48386 - DNA, 915 bp, Homo Sapiens
ggcgcttctgcggcggatcctcgggcgggcagccgggccggcgcgtcacgtggcccacggcgtccagggcgaccagccgcgggccgcagggcatggaccttcaggccgccggggcccaggcgcagggggccgcggagccgtctcggggcccgccgctgcctagcgcgcggggggcgccccccagcccggaggctggctttgctacagctgaccactccagtcaggagagagagactgagaaggctatggatcgactagcccgtggaacacagagcattcctaatgacagtcctgcccggggtgagggcacccattctgaagaggaaggctttgccatggatgaggaggactctgatggagaactgaatacctgggagctgtcagaagggacaaactgtccacccaaggaacagcctggcgatctttttaatgaggactgggactcggagttgaaagcagatcaagggaatccatatgatgctgacgacatccaggagagcatttctcaagagcttaaaccttgggtgtgctgtgccccacaaggagacatgatctatgaccccagctggcaccatccgcctccactgataccctattattccaagatggtctttgaaacaggacagtttgacgatgctgaagattgagtgtggagctttctgccttgtaggtgggcgggcctccacgtcaagatctcttttcctgtcttggaggtgaaaagtcatatctgagaaaatgtttgcagtgacccctagtctggggtacacagaccagtgttccttattgacagtgttcaataaggccccgtcattctcgccagtctgttgttgttcttaatgggctcctccttgaaatgtgtgtgtgtttgtgtcaagaggagttgtgttctttgtaaataaaggttaaaaagagaaa

SEQ ID NO: 48387 - DNA, 1054 bp, Homo Sapiens
gtgtgctcagcctcagagccgtaggcgagagcgcctgtctgcatgagtgagcatatgggtgtttttgagtctgtgggtgtcacagagaggagatcgggagctgcctgctcacaggcactttgggaccccgaaagaaaaggctgtgccgagagagttcttccagtcagaggtgtcatgaagactggacatgggcctatcagggccatgggcatgatgtcagccaaggaactcgcggcctgcctctgccaagagaccagcatctcggcctgagcactcccagcctcccatcgccttcaacctggctgcattcagctgccatgcccctacctccttgtgtggtcagcaccctccaggacttcatcttgggtcacccaaaggccgaggacattgctggccagcaggaaattcatggtgcatccaggaagacttccaagaggtggtggagcagggggcgccacacccagacagctgtgtgtaattgcgcagctgcgggctgctgcgggtgctggccggcagtgcattctgggcacactggactgtgtcaccgcatgcaggctgtggccggagggggaactgctggccgccaaggcctatgtgcctggaaaccagcagggctgctgcaggaggagggctgcagaatgctccagctcagacctgactcagggttttagagggcatagggcataaggctgtggacatagacagccctactgcgcaggaagagcataaaccagccggagggcatgcatgtgggctgctgttagattctgttctcctttgaggtagggaaggatgtgtttctattttatggatgagcaaactgaggcagagtgctggagtgatttcccccagcaacgatggcagatttagctccagggcttagattttaggatcctccctctcaaataccatgatgtatcatgggctttctctccacagaaaattagaaactcagaaatggaaagggaacaatgaaacttacccattctcccactgctcacatttccttctggtttttttgcgtgtgcatataaaatatatctcagaaaattga

SEQ ID NO: 48388 - DNA, 369 bp, Homo Sapiens
atgtcccactgcattgtcatcttgaagatttgtcacactttgagagaaaaacttgttgccatgacaatgggctcagaggctgaaaagaagacttcaaccactgtcagcagcatcattgtggtggccaagtggatcatccccagagtagatgatgttgtgaaatcagtgtaccatctgttaagcaccaagctcctggatgtgagtatgactgccctgctcctgtcacatcaggtgctggtaaccagaaatgcctgccatctgaacaggggccccaaagcacttggaggtgctttgagagcagccttgccttctgaaccagataaagacctcccaggccctaaagcctacttgcaggagcagttgggaatt

SEQ ID NO: 48389 - DNA, 324 bp, Homo Sapiens
atggaaagaagagaaatcgttttatgggttgctcaggagatagaattgacatgtcttgggattgttttgctgtgtaggggagagagacaagtcaagagtatacatcctgtttctgacttggcaactgggtgggtcatgggtctgtttcctgagacagttgtctacagccataccaccgtaagcgccctaaatctcatcagagacagtttatgcaaatggagcttggggaaagagaggtcgtggctggagacagagatttgggcatcatcaacatataggtgtggggagcagagaaggctgaggaagaaagcaggaaacatataa

SEQ ID NO: 48390 - DNA, 2214 bp, Homo Sapiens
tcccaaggtgccaccaaggctcagacacacagattctcagaggaagtgtggactcacaggtgggcaatgcctagcagaggcaaagatatagaggtaagggagttccttacttactatatcttacaaagatatagaggtaagggagttccttacttactatatcttacaaagatatagaggtaagggagttcctctgaatctgggtggccagattcagcttcccacccaaccctgggtccccaggaggtggtgtcaagagaggccatggcctgggatgcgggcccttcttcctcccagaacactggcctgaatcagccagctcttggcacacacagccaggtccacaggcacaactgttccttggggcccctgagggcagggggtgtgctggggctgtggcttgtaatgtctggagtgagtgcaggctcagatcagggcgaggctgcttgtccagagaggcagaaaattctccaacagaagacccccaaggcggagggccctggggctggactcctggaggttgttctgagcttaccctgtggacggattggagggtggccctccttccccacaaggatcaagagggggtgggggatggtgggagggcaatctggccaggcgaacctgcgggggaggctcccgccctccccagtcccaccatctcagccccgcagcctctttctccctggagacagccaggtgcggcccaggatcccgggaaaggcaggggagggggtggcgtcttcgctcctcaggcgctggcccggcccagaggggacaggaagccaggacaccggggattgtctctcgcaaccgcagcccagccccagtccgggaggaagttctgcccggcgctctccgccggtgcctccctggttatattgttgaacaggaaacccggcagcgcgggagccgcacagtcgaggagggagcgcgggacgccgagcccacgcgcgcctgccggggcaagtggaggcgaagccggcgagcggacgccccgagggtcggggaaggaaccgaggtccggtccccttcttatccagcccgagacatcgagctccggtgggcgtccctgcgctgggaatcccgctcggagtttttccaggcccggccgggctgctccgggaaaggccctgctcctgttccgcgcagcctctccggcctcgcccctggaaaccccgcccagggcgatggtaggggcctaacctgcagccaccgccggctccgcccacccagcccatgggctccctgaggcccgcccagccgacgaaaacgccgcggctgcgatggcggcggacgtggtgggggacgtgtacgtgctggtggagcaccccttcgagtacaccggcaaggacgggcgccgcgtggccatccggccgaatgagcgctaccggctgctgcggcgcagcaccgagcactggtggcacgtgcggcgtgagcccggcggccgccccttctacctgcctgcgcagtacgtgcgcgagctgcccgcgctgggcaaccctgccgccgccgcgccgccaggtccccacccgagccccgcggcccctgagccgctcgcctacgactaccggtttgtgagcgcggcggcgaccgcgggccccgacggcgcccccgaggagtccggaggccgagccagctccctgtgcggccctgcgcaacgcggcgccgcgacccagcgcagcagcctggcgcccggcctgccagcctgcctgtacctgcggcccgcggcgcccgtgcggcccgcgcagtccctgaacgacctggcctgcgccgccgtctcgcctcccgccggcctcctaggaagcagcggcagcttcaaggcctgcagcgtggcgggctcctgggtgtgcccgcggcctctggcgcgcagcgactcagagaacgtctacgaggtcatccaggacttgcacgtcccgccgccggaggagagcgcagagcaggtacctccccgggcgctggggcgcggaggcgggtggcgcgctagggaccgcgcccgcacggagccggggcgcaaggagacccgctccgctcagcgtcgggcacgacgcccacctctgtccgaagacttcggatgagctccctctccccaaccgcgaaacgtgaggggtgcacgcccgcagtccctcatcagcaattcccaagctccaaagctccctggaagcccagaggcttttcgtaatccaattggtggcaaaattgcgcttgaactga

SEQ ID NO: 48391 - DNA, 444 bp, Homo Sapiens
atgggtggctgtatgcacagtacccaggacaaatctctccacttggaaggagatcccaatccttctgcagccccaacatccacctgcgcacctaggaaaatgcccaaaaggatttcaatatccaaacaactggcttcagtgaaagctctgaggaagtgctcagatctggaaaaagctattgccaccactgctctgattttcagaaattcttctgactctgatggtaaacttgaaaaagctattgccaaagatctgctgcaaacccaatttaggaatttcgcagagggacaagaaaccaagccaaaatacagagagatcctttctgaacttgatgagcacacagaaaataagctagattttgaagacttcatgatcttgctcttaagcatcactgtcatgtcagatctgctacaaaatatacggaatgtaaaaattatgaaatga

SEQ ID NO: 48392 - DNA, 672 bp, Homo Sapiens
atggagggactggtcttccttaacgccctggccactcggttgctgttcctgctgcactcgctggtcggggtctggcgagtgaccgaggtgaagaaggagccgcggtactggctgcttgcgctgctcaacctcttgctcttcctggagactgcgctcaccctcaagttcaagcgcggcagaggctacaaatggttttcaccagccatatttttatatctgattagcatcgttccatcattatggcttcttgaattgcaccatgagacccagtattgcagtatccaggctgaaggaacatcacagaataccagcagaaaagaagacttcaatcaaacattgacatccaatgaacaaaccagtagagctgatgatctcattgagacggccaaagtttttgtgaataacttatctacagtatgtgagaaagtttggacattgggactccatcagacattcctgttaatgctaataattggaagatggcttctacccattggaggcgggatcactcgagatcaactctctcaacttcttcttatgtttgtggggacagcggctgacatactggaattcacaagtgagaccctagaagaacaaaatgtgaggctctgttggaaaaattccactaatagaagacatactaaccccaagtggcaacttgttctattttga

SEQ ID NO: 48393 - DNA, 249 bp, Homo Sapiens
gagagaagggggatccaggacctcctggacttgatgttccaggacccccaggtgaaagaggcagtccagggatccccggagcacctggtcctataggacctccaggatcaccagggcttccaggaaaagcaggtgcctctggatttccagggcctcagggtgtggaagggcctcctggaccttctggagttcctggacaacctggctccccaggattacctggacagaaaggcgacaaaggtgatcctg

SEQ ID NO: 48394 - DNA, 2676 bp, Homo Sapiens
acgtgacctttgctcatggcggcggcggcggcggcggcggtgctggtggtgctcggcggccggagccggatcctgtagccgggtgtgggcccgtgtctgtccgtccctccttcggccccctctcttgtcttccggagtgtggctggcggagctgggatggcggaacgaggcctggagccgtcgccggccgcggtggcggcgctgccgcctgaagtgcgggcgcagctggcggagctggagctggagctctcggagggggacatcacccagaagggctatgaaaagaaaaggtccaaactcctatctccttacagcccgcagacacaagaaactgattcagcagtacagaaagaacttagaaaccagacacctgctccatctgcagctcaaacttctgctccctctaagtaccaccgaactcgatctgggggagccagggatgaacgatatcgatcagatatccacacagaagcagttcaggctgcactggcaaagcataaagaacagaagatggctttgcccatgccaaccaaaaggcgatccacatttgttcagtctcctgcagatgcctgcacacctcctgacacatcttcggcctctgaggatgagggctctctgagacgccaagctgcgctctctgctgccttgcaacagagcttacagaatgctgagtcctggatcaaccgttcaattcagggatcgtccacttcttcatccgcatcttctacgctgtcccacggagaggtcaaaggaaccagtgggtctctagctgatgtatttgccaatactcgaatagagaatttctctgctcctcctgatgtcactacaactacctcttcctcctcatcatcttcctcaattcgcccagcaaacattgacctgcccccctcggggatagttaaaggcatgcacaaaggatccaacaggtccagccttatggatacagctgatggtgttcctgtcagtagcagagtatctacaaaaatccagcagcttctgaacactctgaaacgacccaaaaggcctcccttaaaggaattttttgtggatgactctgaagaaattgtggaagtacctcagccagaccccaaccagcccaagccggagggacggcagatgacccctgtgaaaggagagcctttaggagtcatctgtaactggcctcctgctcttgaatctgccctgcagcgctggggtaccactcaagcaaaatgctcctgtctgactgcactggacatgacagggaaaccagtttacactcttacatatggtgagtctgcaagattccagatccttctctcctgagagttcttcagaatatcatgggtagtgtttttatctagatacttagcagttgctggccattatgtttcagtagattttttcaataatttaaaaggatcctaagctctaagtaaagctattgccaaatattttcatttgctaaagcaacatttgcaagccagctaatatttaaaagacagcaaaaagaagagagactttgtacatccatagatgttttaacattacaagaggattttagaaaaacatttggtattgatgtatggtgaaaatcagatggttttatctaacagttgaaactgattacttgttaaatctttattccatcctgcttcttgattataataggcacaaaattctgtaatgaacaaagaatgagtacttttccgtttaattttgcatactagctaaaatttttctttttaaaataacttcaaggaaaaatggggtcaaccctgggctatgagattttgtactagtttattcaaacagattccttttctcctttgcaagtggagcacagtgtccatagacctagatggaaaataatctttgaggaaaaacaaggttttatttaaagaattacgcaggttgacatagtttaaactttggatgcccctctgaataaattgtatgtaaaataacgtagctatttaaaataacatgatttcccttatctcataatctaaaataagaatttctaagagtggttgagggaagggagtaggaaaagaaaagcattttttgtttgtttttgtcaaaattgttttaacattcacctcagaagctgtatatacatttcattcatataacccttaaagaaagcatttagctggccaaatctttgcatgtttatttaacatctatgaatacatccatatgttcatacagataatttccattttaatgtttgtttttactaaattacagcagtatggaatgtttaatcatttgagtcatgtttttgctttgcagtttcctcaagtgtctgataccacctatgtaagtggtttttcagaaaaagcttacaacatttctgaagatatttgtaaattttttaaaaaactggccgggcacagttggctcatgcctgtaatcccaacactttgggaggctgagacaggtggatcacctgaggccaggaatttgagaccagcccagacaacatggcgaaacctcatctctattaaaaatacaaaaattagccggatgtggtgacacacacctgtagtcccagctacttgagaggctgaggcaagaattactcaaacagggagacagacagaggttgcagtgagccgagattgcaccactgcactccagcctgggcgacagagtgagactctgtcttaaaaaaaaaaaaaaaaaaaaaaa

SEQ ID NO: 48395 - DNA, 645 bp, Homo Sapiens
atgtatctcaaaataataagagctatttatgacaaacccacagccaatatcatactgaatgggcaaaagctggaagcattccctttgaaagccagcacaaggcaaggatgtcctctctcaccactcctattcaacatagtattagaagttctgaccagggtattcaggcaagagaaagaaataaagtgtattcaaataggaaaagaggaagtcaaattatctctgtttgcagatgacgtgatcatatatttagaaaactccatcatctcagcccaaaaattccttaagctgataagcaacttcagcaaagtctcaggatacaaaatcaatgtgcaaaaatcacaagcattcctatacaccaataataggcaaacagagagccaaatcatgagtgaactcccattcacaattgctaaaaagagaataaaatacctaggaatacaacttacaagggatgtgaaggacctcttcaaggagaactacaaaccactgttcaaggaaataagagaggatacaaacaaatcgaaaaacatcccatactcatggataggaagaatcaatattgtgaaaatggcgatactgcccaaagtaatttatagattcaatgctattcccatcaagctatcattgactttcttcacataa

SEQ ID NO: 48396 - DNA, 1041 bp, Homo Sapiens
cagggactgttgacattcagggatgtagccatacaattctgtctggaggactgccaatacctggatgctgctcagcagaatttgtataaggatgtgatgttagagaactacagaaacccggtcttcttcgttgaggataacttcaatatagaattcctaatttaccctaaaggtattgtcttctctaagccagacctggtcacctgtctggagcaaaggaaaaagccatggagtatgaagcacccaggtagtgagataatttgttatttttatttctttcagccgtgttctcatttcacccaagacctttggctagatcagaacataaaaaattcatttcaaaaagtgatgatgagaagatatgggaaatgcagacatgagaatttacaaataaaaggttgtaaaagtttgaatgcatctaaggtgcaggaaggaggttataatggacttaaccaatgtttgttgattactcagagcaaaatacttcaaagtaatacatgtgtgaaagtctttaggaaattttcaaattcaaatagacttaggagaagacatactggagagaaacctttcaaatgtaaagaatgtggccaattctttcacaggttctcacacctaagacaacatcagataattcatactgaagagaaaccctaccaatgtgaagaatgtggcaaagattttaagcagtcttcagatcttactatacatgagagaattcatactaaagagagaccctacaagtgtgaagaatgtgacaaagcctttaaacaatcttcaaaactgaataaacataagaaaatttatactggagacacaacctacaaatgtgaagaatcttttaagtggtcttcaaaccttactatacacaagataattcatacaagagaattcatacgggagagaaaccctacaaatgtgaagaatgtggcaaagcttgtaagcagtctttggggcttactatacaaaagagaattcatactgaagagaaaccctacaaatgtgaagaatgtggtaaagccttttactgttcctcaaacctta

SEQ ID NO: 48397 - DNA, 1965 bp, Homo Sapiens
caggaccagtgatggtatagaacactgtattagagacatggagctggggctggatgaagattccatcagtaattcaatcaacagacaagtgttatccaatcacgtctttaaatcaatcactgacatggagctggggctggatgaagattccatcagtaattcaatcaacagacaagtgttatccaatcacgtctttaaatcaatcactgatcccagcccctataaaagggagcaggcttaggaggcacatcagataaacccagtgtggaaagctagtcacacatcagctcagtgttcggcccgggattacccagtcaaccaaggagcttgcagttttaaagaatccaccaactgttgaaacaaatccctagagacacaaggcaagagactgaatcatcaaagtaaagtctctctgagaattattgctaagaatggctttagatctaagaaccatatttcagtgtgaaccatccgagaataatcttggatcagaaaattcagcgtttcaacaaagccaaggacctgctgttcagagagaagaagggatttctgagttctcaagaatggtgctcaattcatttcaagacagcaataattcatatgcaaggcaggaattgcaaagactttataggatctttcactcatggctgcaaccagaaaagcacagcaaggatgaaattatttctctattagtcctggagcagtttatgattggtggccactgcaatgacaaagccagtgtgaaagagaaatggaaatcaagtggcaaaaacttggagagattcatagaagacctgactgatgacagcataaatccacctgccttagtccacgtccacatgcagggacaggaagctctcttttctgaggatatgcccttaagagatgtcattgttcatctcacaaaacaagtgaatgcccaaaccacaagagaagcaaacatggggacaccctcccagacttcccaagatacttccttagaaacaggacaaggatatgaagatgaacaagatggctggaacagttcttcgaaaactactcgagtaaatgaaaatattactaatcaaggcaatcaaatagtttccctaatcatcatccaggaagagaacggtcctaggcctgaagagggaggtgtttcttctgacaacccatacaactcaaaaagagcagagctagtcactgctagatctcaggaagggtccataaatggaatcactttccaaggtgtccctatggtgatgggagcagggtgtatctctcaaccagagcagtcctcccctgagtctgcccttacccaccagagcaatgagggaaattccacatgtgaggtacatcagaaaggatcccatggagtccaaaaatcatacaaatgtgaagaatgccccaaggtctttaagtatctctgtcacttattagctcaccagagaagacacaggaatgagaggccatttgtttgtcccgagtgtcaaaaaggcttcttccagatatcagacctacgggtgcatcagataattcacacaggaaagaagcctttcacatgcagcatgtgtaaaaagtccttcagccacaaaaccaacctgcggtctcatgagagaatccacacaggagaaaagccttatacatgtcccttttgtaagacaagctaccgccagtcatccacataccaccgccatatgaggactcatgagaaaattaccctgccaagtgttccctccacaccagaagcttcctaagctgctggtctgataatgtgtataaatatgtatgcaagtatgtatattcctatagtatttatctacttaggatataagatataatctcctgattatgctttcaatttattgtcttgcttcattaaaatgtaaggctaaggagagcatggaatttgtcagttttgttcactaaagtattccaagtggttgggaaagtggaacatttccaagaaccaataaatttctgttgaat

SEQ ID NO: 48398 - DNA, 117 bp, Homo Sapiens
gtcatccatactgtagggccaatagccaggggccatattaatggttcccacaaggaagaccttgcaaattgctataaatcatctctgaagctcgtgaaagaaaataacatccgatca

SEQ ID NO: 48399 - DNA, 534 bp, Homo Sapiens
gtctcccccatcaactgcagcctttgcctcaagcccgacttgctggacttcaccttcgagggcaagctggaggccgccgcccaggtgaggcaggcgactaatcagattgtgatgaattgtgctgatattgatattattacagcttcatatgcaccagaaggagatgaagaaatacatgctacaggatttaactatcagaatgaagatgaaaaagtcaccttgtctttccctagtactctgcaaacaggtacgggaaccttaaagatagattttgttggagagctgaatgacaaaatgaaaggtttctatagaagtaagtatactaccccttctggagaggtgcgctatgctgctgtaacacagtttgaggctactgatgcccgaagggcttttccttgctgggatgagcgtgctatcaaagcaacttttgatatctcattggttgttcctaaagacagagtagctttatcaaacatgaatgtaattgaccggaaaccataccctgatgatgaaaatttagtggaagtgaagttt

SEQ ID NO: 48400 - DNA, 2431 bp, Homo Sapiens
ctctttcgctccctccttagctcgccggctcccagcctttgatgccacaagtaaacaaacctcgcatgtcgccttctgctgggtcctggaggtcttggaagcctgatgaactcgtctttttcagtttcctggaaccctctgctgtggtcctcgtgataagagtgacctttttggcctgctctccccagctcttttccagtcctcatgcagggtatcagcattgctgagtggcctgcccaggatgacacaactgccagaactcggcctgaggtctcctaacaacaaatcccccactggtccccacccactggagcacctacttgccaggcttctcaagcgaagaaggagatccactctgatgtcatctcccaggagccttctctgcagcatctcaggtcctggctctcacctcctcagcacccatcccatcctgtgtcactctgtatatcagcctccccagccagcctccaggccacaagccaagaggtatcaagggctcctccctgtcccactggccccacatccactgtgtctatctggtcaactttaccttccaaacattccctgcacagtgatagatggctgtggccctgtcatctctcacctgaaattaacaatgtatccttggggcctcccaccctcacatcttggctcctccagccccttctctgcaaacatggaacagtgggattattataaatctcagacccgttttgcccctttcctgcctgagagtttttgtggttccccactgccctcagaacaaagctcaagaccctttggcctggcattcaaggtcctttgtgctgccacctgtcaacctccccagttccagctcctttggctttgcccatacaagctggatctgcaccagaggatctgtcttcctcccaacttggccctagtcctcctaggagccctttggacgtcacctcccccaggaagctttctgcaaccaccctacaaccgtccctataaactttataaaaccaattagtgtggggaaaagcaagagagatcagattgttactgtgtctgtgtagaaagaagtagacataggagactccattttgttatgtactaagaaaaattcttctgccttgagattctgtgaccttacccccaaccccgtgctctctgaaacatgtgctgtgtcaactcagagttgaatggattaagggcggtgcaagatgtgctttgttaaacagatgcttgaaggcagcatgctcgttaagagtcatcaccactccctaatctcaagtacccagggacacaaaaactgcggaaggccgcagggacctctgcctaggaaagccaggtattgtccaaggtttctccccatgtgatagtctgaaatatggcctcgtgggaagggaaagacctgaccgtcccccagcccgacacccgtaaagggtctgtgctgaggaggattagtaaaagaggaaggaatgcctcttgcagttgagacaagaggaaggcatctgtctcctgcctgtccctgggcaatggaatgtctcggtataaaacccgattgtatgctccatctactgagatagggaaaaaccgccttagggctggaggtgggacctgcgggcagcaatactgctttgtaaagcattgagatgtttatgtgtatgcatatctaaaagcacagcacttaatcctttacattgtctatgatgcaaagacctttgttcacgtgtttgtctgctgaccctcttcccacaattgtcttgtgaccctgacacatccccctcttcgagaaacacccacagatgatcaataaatactaagggaactcagaggctggcgggatcctccatatgctgaacgctggttccccgggtccccttatttctttctctatactttgtctctgtgtctttttcttttccaaatctctcgtcccaccttacgagaaacacccacaggtgtgtaggggcaacccacccctacaaattagggaagaagtagggggaaaagatgaaaataaaccaagcctgcagcatactcagtattcatcatgaggtcagctgctctctgacctgcttcctcatggctggttggtgcctgttgtcccggagtgacaaagaccctagattatagctgcccttaactgctgtataaataacaacttgaacatgaaatgctaaattttccttttgaagtattccttcagatcctgcatgctgataaaactactgactcaactggtccccatgaggagctggctcaccaaagaatgcggtttccaatcccaattatttcatgccccttgcttaggcaatcaacaatcccaaatttccagccccttgccctccacaatctccttaaaaaattcagtccaaaactccttggggagatggatttgaaggtctcctcccatctccaaacttggtgccctgcaatcattaaactctttctctgctgc

SEQ ID NO: 48401 - DNA, 450 bp, Homo Sapiens
atggcgcccgaggagaatgcggggaccgaactcttgctgcagagtttcgagcgccgcttcctggcggcgcgcacgctgcgctccttcccctggcagggcttagaagcaaagttaagagactcatcagattctgagctgctgcgggatattttgcagaagactgtgaagcatccttgtgtgaagcacccgccgtcagtcaagaaagcccggtgctttctctcagaactcatcaaaaagccctcgggaggctcagtcacactctccgagagcacagccatcatctcccatggtaccacaggcctggtcacatgggatgccaccctctaccttgcagaatgggccatcgagaacccagcagccttcactaacagacgtgctgtattgcccagaagccatcgtgtcgctggtcgggatcctgcggaggctggctgcctgctgggagcaccagca

SEQ ID NO: 48402 - DNA, 972 bp, Homo Sapiens
atgtggcagaagaatcagacctctctggcagacttcatccttgaggggctcttcgatgactcccttacccaccttttccttttctccttgaccatggtggtcttccttattgcggtgagtggcaacaccctcaccattctcctcatctgcattgatccccagcttcatacaccaatgtatttcctgctcagccagctctccctcatggatctgatgcatgtctccacaatcatcctgaagatggctaccaactacctatctggcaagaaatctatctcctttgtgggctgtgcaacccagcacttcctctatttgtgtctaggtggtgctgaatgttttctcttagctgtcatgtcctatgaccgctatgttgccatctgtcatccactgcgctatgctgtgctcatgaacaagaaggtgggactgatgatggctgtcatgtcatggttgggggcatccgtgaactccctaattcacatggcgatcttgatgcacttccctttctgtgggcctcggaaagtctaccacttctactgtgagttcccagctgttgtgaagttggtatgtggcgacatcactgtgtatgagaccacagtgtacatcagcagcattctcctcctcctccccatcttcctgatttctacatcctatgtcttcatccttcaaagtgtcattcagatgcgctcatctgggagcaagagaaatgcctttgccacttgtggctcccacctcacggtggtttctctttggtttggtgcctgcatcttctcctacatgagacccaggtcccagtgcactctattgcagaacaaagttggttctgtgttctacagcatcattacgcccacattgaattctctgatttatactctccggaataaagatgtagctaaggctctgagaagagtgctgaggagagatgttatcacccagtgcattcaacgactgcaattgtggttgccccgagtgtag

SEQ ID NO: 48403 - DNA, 384 bp, Homo Sapiens
atgcctaaatcaaaggaacttgtttcttcaagctcttctggcagtgatcctgacagtgaggttgacaaaaagttaaagaggaaaaagcaagttgctccagaaaaacctgtaaagaagcaaaagacaggtgaaacttcgagagctctgtcatcttctaaacagagcggcagcagcagagatgataacaagtttcagattgggaaaatgaggtacgttagcgttggagattttaaagggaaagtgctaattgatactagagaatattggatggatcctgaaggcgaaatgaaaccaggaagaaaaggtattgctttaaatccagaacaatggagccagctgaaggaacagatttctgtcattgatgatgcagtaagaaaactgtaa

SEQ ID NO: 48404 - DNA, 507 bp, Homo Sapiens
atgctctactccacccccaaagtaccatccagccttctgtcccacgagtgtccagccccgccaagtcctgacacccaggactccccatgcctctgggtccgcgagttgtgctgctggggacagagatgtcaatgctgccagcacagagcccacccccaccgtcagcttgctgggaccacattctccacagtttttccccagggatcatgctttgcagaagcaccacacacagagggcacacgggccatctgggcaatgctggttgcggccttctgggctccaggcctctgtcctcaagcccctgtagagggtaccctggggcaggtgctggttggaccccagcagaggacacggtgggccagggctggagcccagaatggcctgtctgcagagctctctgaaagtccaggcctgctcagagacacaaaaatcagcaggctgacctggctctcccctggctgctgggagacccactccgcagaccacaccgagggacagggaagctag

SEQ ID NO: 48405 - DNA, 1153 bp, Homo Sapiens
tatggtgccaggggaggagccagcgcgcgagcttatggcggttcttttgactccgaggttccgtagacttgtcagtcagaacgagcttccgggcccagggctgaacgggccaagttccaggaaccgtagagatggcttctgccggaaaaggaggacaggatgctctggtccttttcaagctactcagctatgggatggtattattcactctcttcaggcccaagtggaaataaaaagaaggaggcatcatttacagacatacaaagactgtttcactggttctgatgctgtcgatgtggtcttaagtcatcttatgcaaaacacgtgcctaagtagcaatgacatctcttgtcttaaaggggttcatctttgccaagttctaatgaatcacaaagtatttgaaccagtaggaatgaagaagcttttcaaaaaagaaaaggaattagaatttgaagattccaacattagtctctacaggtttctaggcaataaatcatcttacgattgttgcaaaagacaaaaggatgctgagaatgagttcaatgaaaccttgagaccaggatatgaaatgatttcaaatcctctagcacaggagattggtgaggaaagaattgaggaacttattcatacaataaatgggaatccagctttatgtccaaatatcacagttcagaaaccttttctccggctttcaaaagaagatgtttggaaagaacaaacattattatgtcttcttcaattgattcaccttccattcttggacaatattttggagcctccagttaaaacacaaaatcttcaactaaacaaagaggaagatcttgttatcactaacacttgcctagacagagaacttattccaagcttatgtctacctgaaaaatgagaaaagagcagaagcacttgaagcaacacaactatatctaagattgctgttgctgaacattagagaagaattacgacggctacttacttttatggcaatggcatcagagcccaatgcctacaagttgcaaaaacaggtgaaaaattttgcaataagttttgccatttttttttgctatttttttcctctaaaaaccatttatgctaatgttaatctttctgtttacagtatgataataaaacagtggtcctgaaaactcttgccaaa

SEQ ID NO: 48406 - DNA, 369 bp, Homo Sapiens
atggtgaaacccctatctctactaaacatacaaaaattagccaggcatcatggcctgcgcctgtggtcccagctactagggaggctgaggcaggtgggtcacgtggggtcaggagttcgagatcagcctgggcaacatggtgaaacccccatctctactaaaaatacaaaaattagccaggcatcatggcccacgcctgtggtcccagctactagggaggctgaggtggaaggatcgcttaagtcctggggtcaaggttgcagtgagttattatcgtaccactgtactccagcctgggcaacagtgagaccctgcctcaaaaaaaaaaaaatgaaacaaaaacttacttgcctactcccacctaattag

SEQ ID NO: 48407 - DNA, 1471 bp, Homo Sapiens
atccccaccatcccagctgctgtgaaatgggcaaatgtcttgcctccaggacctgggaagggtgatgcagctcacctccctcctgttcacaccccagccaccccagccatcccagccgggtcccagccacccacacagcacctcctcctggccccgccctgcccagcccctcccaggtgcctgaggtggagccgccagttcccacagcaccccagcggcctgccatggggggtctaaggccctggtcccgatacgggctcctggttgtggcccacttgctggccctggggcttggggctgtggtgttccaggccctggaggggcctcctgcatgcaggcttcaggctgagctcagggcagagctggcagccttccaggcagagcatagggcctgcctgccacccggagctctggaagagctgctgggcactgccctggccacccaggcccatggggtctccaccctgggcaacagctcagagggcaggacctgggaccttccctcagccctgctcttcgctgccagcatcctcaccaccacaggttatggccacatggccccactatcgccaggcggaaaggccttctgcatggtctatgcagccctggggctgccagcctccttagctctcgtggccaccctgcgccattgcctgctgcctgtgctcagccgcccacgtgcctgggtagcggtccactggcagctgtcaccggccagggctgcgctgctgcaggcagttgcactgggactgctggtggccagcagctttgtgctgctgccagcgctggtgctgtggggccttcagggcgactgcagcctgctgggggccgtctacttctgcttcagctcgctcagcaccattggcctggaggacttgctgcccggccgcggccgcagcctgcaccccgtgatttaccacctgggccagctcgcacttcttggtggagggacctcactccagggcacggcgtgggaggggtagtcgaagagctctggtggcagcgttgagaagggggtgagtggtgccagttgccagggcaagtcactgcgctgggaggtgggcggggagcatcaccagaacccaggcgctgccccagcaccttctcctccccaggttacttgcttctaggactcttggccatgctgctggcagtggagaccttctctgagctgccgcaggtccgtgccatggggaagttcttcagacccagtggtcctgtgactgctgaggaccaaggtggcatcctagggcaggatgaactggctctgagcaccctgccgcccgcggccccagcttcaggacaagcccctgcttgctgaagcgtcaggtgaccgagttcagctccgtaaggtggcggcacctgaggaggaagcagccaggagtggctggggaagaatctggagatggagccgcggtgagggtgggcgggaggcctcagaggatactgttaatcataaaatgagcaacga

SEQ ID NO: 48408 - DNA, 1329 bp, Homo Sapiens
cccttggcagatgagaagaacatcctgcacatcatggtgaaggtggtgaagggccaccgccccgagctgccgcccgtgtgcagagcccggccgcgcgcctgcagccacctgatacgcctcatgcagcggtgctggcagggggatccgcgagttaggcccaccttccaagaaattacttctgaaaccgaggacctgtgtgaaaagcctgatgacgaagtgaaagaaactgctcatgatctggacgtgaaaagccccccggagcccaggagcgaggtggtgcctgcgaggctcaagcgggcctctgcccccaccttcgataacgactacagcctctccgagctgctctcacagctggactctggagtttcccaggctgtcgagggccccgaggagctcagccgcagctcctctgagtccaagctgccatcgtccggcagtgggaagaggctctcgggggtgtcctcggtggactccgccttctcttccagaggatcactgtcgctgtcctttgagcgggaaccttcaaccagcgatctgggcaccacagacgtccagaagaagaagcttgtggatgccatcgtgtccggggacaccagcaaactgatgaagatcctgcagccgcaggacgtggacctggcactggacagcggtgccagcctgctgcacctggcggtggaggccgggcaagaggagtgcgccaagtggctgctgctcaacaatgccaaccccaacctgagcaaccgtaggggctccaccccgttgcacatggccgtggagaggagggtgcggggtgtcgtggagctcctgctggcgcggaagatcagtgtcaacgccaaggatgaggaccagtggacagccctccactttgcagcccagaacggggacgagtctagcacacggctgctgttggagaagaacgcctcggtcaacgaggtggactttgagggccggacgcccatgcacgtggcctgccagcacgggcaggagaatatcgtgcgcatcctgctgcgccgaggcgtggacgtgagcctgcagggcaaggatgcctggctggcactacgctgcctggcagggccacctgcccatcgtcaagctgctggccaagcagccgggggtgagtgtgaacgcccagacgctggatgggaggacgccattgcacctggccgcacagcgcgggcactaccgcgtggcccgcatcctcatcgacctgtgctccgacgtcaacgtctgcagcctgctggcacagacacccctgcacgtccgcggagacggggcacacgagcactgccaggctgctcctgcatcggggcgctggcaaggaggccatga

SEQ ID NO: 48409 - DNA, 1017 bp, Homo Sapiens
gtcggaactcggccgcgggacatccacggggcgcgagtgacacgcgggagggagagcagtgttctgctggagccgatgccaaaaaccatgcatttcttattcagattcattgttttcttttatctgtggggcctttttactgctcagagacaaaagaaagaggagagcaccgaagaagtgaaaatagaagttttgcatcgtccagaaaactgctctaagacaagcaagaagggagacctactaaatgcccattatgacggctacctggctaaagacggctcgaaattctactgcagccggacacaaaatgaaggccaccccaaatggtttgttcttggtgttgggcaagtcataaaaggcctagacattgctatgacagatatgtgccctggagaaaagcgaaaagtagttatacccccttcatttgcatacggaaaggaaggctatgtacttgaagaagtctttcttctgcaaaatatccttgtctcatgtcacagaacaaccctgcatgtcttgaaatgcatgttgttattaaataacaatacatgcgcagaaggcaagattccaccggatgctacattgatttttgagattgaactttatgctgtgaccaaaggaccacggagcattgagacatttaaacaaatagacatggacaatgacaggcagctctctaaagccgagataaacctctacttgcaaagggaatttgaaaaagatgagaagccacgtgacaagtcatatcaggatgcagttttagaagatatttttaagaagaatgaccatgatggtgatggcttcatttctcccaaggaatacaatgtataccaacacgatgaactatagcatatttgtatttctactttttttttttagctatttactgtactttatgtataaaacaaagtcacttttctccaagttgtatttgctatttttcccctatgagaagatattttgatctccccaatacattgattttggtataataaatgtgaggctgttttgcaaacttaa

SEQ ID NO: 48410 - DNA, 1328 bp, Homo Sapiens
ggattcccccggcctgggtggggagagcgagctgggtgccccctagattccccgcccccgcacctcatgagccgaccctcggctccatggagcccggcaattatgccaccttggatggagccaaggatatcgaaggcttgctgggagcgggaggggggcggaatctggtcgcccactcccctctgaccagccacccagcggcgcctacgctgatgcctgctgtcaactatgcccccttggatctgccaggctcggcggagccgccaaagcaatgccacccatgccctggggtgccccaggggacgtccccagctcccgtgccttatggttactttggaggcgggtactactcctgccgagtgtcccggagctcgctgaaaccctgtgcccaggcagccaccctggccgcgtaccccgcggagactcccacggccggggaagagtaccccagccgccccactgagtttgccttctatccgggatatccgggaacctaccagcctatggccagttacctggacgtgtctgtggtgcagactctgggtgctcctggagaaccgcgacatgactccctgttgcctgtggacagttaccagtcttgggctctcgctggtggctggaacagccagatgtgttgccagggagaacagaacccaccaggtcccttttggaaggcagcatttgcagactccagcgggcagcaccctcctgacgcctgcgcctttcgtcgcggccgcaagaaacgcattccgtacagcaaggggcagttgcgggagctggagcgggagtatgcggctaacaagttcatcaccaaggacaagaggcgcaagatctcggcagccaccagcctctcggagcgccagattaccatctggtttcagaaccgccgggtcaaagagaagaaggttctcgccaaggtgaagaacagcgctaccccttaagagatctccttgcctgggtgggaggagcgaaagtgggggtgtcctggggagaccaggaacctgccaagcccaggctggggccaaggactctgctgagaggcccctagagacaacacccttcccaggccactggctgctggactgttcctcaggagcggcctgggtacccagtatgtgcagggagacggaaccccatgtgacagcccactccaccagggttcccaaagaacctggcccagtcataatcattcatcctgacagtggcaataatcacgataaccagtactagctgccatgatcgttagcctcatattttctatctagagctctgtagagcactttagaaaccgctttcatgaattgagctaattatgaataaatttggaa

SEQ ID NO: 48411 - DNA, 2099 bp, Homo Sapiens
tcaccacattggccaggctggtttcaaactcctgacctcagcctcagcctcccaaagtgctaggattacaggcatgagccaccatgcccagccaacactgaacattttgttcagaactagttaagaaaacagaaatatacattgggggtttatggattacttatttttggggtgcaatactgggaatagaagagaaaggagcttcctttccctctccttctttcattcattcattcattttgagaagaagtcctgctctgttgcccaggatggagtgcagtggcgaaaactcagctcactgcaacctccacctcctgggttcaagcaattctcctgcctcagcctcccaagtagctgagattacaggcacgcaccaccacacacagttaatttttatacttttttagtagagacagggttttgccattttggctaggctggtctccaactcctgacctcaggtgatccacctgcctcagcctcccaaagtgctgggattacaggcatgagccaccgcacctggccaagaaaggagctttagataaataaaatgattaaacatttgtagcatgtagaatgaaactattcccttagtaatactcaaattatccagatttccaagatgttggtagcaccccgagagcttcaaaagggaaattaaaagaaaaacgacgttacccttcctgaaacacagattcactgtttgccatattcttttctctagtaaaagatgaatagtttcccctggaaaaactaaaaacaatctgaggtatatttcagagaaaacaaaattgcttgataaaaatgccatgttaacaactgaggaaattgttttacatatattaattttaacacaggaataatatgtcaaaccaggatttctcaacctcagcactatcgacattttaagctgtatagtttttggtgtgggaggctgtcctgtatattgtagaatgtttagtggcagccctggcctctacccaaggggccagtaggacctacctcctcattcaagctaatgcactaaatttttcccttcattgacaaatcccattaatgcgtgtatttatcccattagttactctcttgtgttccaggtactttgttaggcaccagagaaaatatgataaagcaaaacagctattttcctcactctcatggtgcttacagccatggtgggaaaaatccataggaaaagactcacatacacaaatgcaggcagaataaaaaaactcacacaaacaaacgttgcagatgttgttaagttacataaaggagatatgcatggctgtgcatggtggctcgtgcctgtaatcttagcacttggggaggccaaggcaggtggatcacttgaggccaggagctcaagaccagcctggccaacatggcgaaaccctgtctctactaaaaatacaaaaattagccaggcatggtggtccatgcctatgatctcagctacttgggagactgaggtgggaggatcacttgggcccaggaggcagagggtacagtgaactgagattgcaccactgcaatctcagcctaggagacagagagagacgtctcctgttctcctggagaacaacaagtcatgatgtcagacaagaacttggattttggagacacgggtttgaatttcagtcattcattcttttattcagtaaatatttagcaagtactgacatgtcccagatgttgttttactcactggttatacaatgggagggagacagagaaagagggagagagagagagagagagagagagagagagagagacgctattctaaaagcttgaagtctaggctgtgcagagtggctcatgcctataatcgcagcactctgggaggctgaggcgggtggatcatgaggtcaggagattgagatcatcccggctaacacagtgaaactccctctctacaaaaatacaaaaaattagctgagcatggtggcaggcgcctatagtcccagctactttggaggctgaggcaggagaatggcgtgaacccaggaagcggagcttgcagtgagccaagatcacaccaccgcactccaggctgggcgacagagccagactccatctcaaaaaaaaaaaaaaaa

SEQ ID NO: 48412 - DNA, 1053 bp, Homo Sapiens
agtcccaggagactacagcaaacgagtgtatcaaggagtgagagtgaagcatacagtcaaagatctcctggcagaaaaacgatccgggcagacaagtaactcaagacttaatggcagcgtcagttcctctcagtctccatttgtgcagatgccaggttcgccggtcacgtcaggttactacggtgtcagaagatctttcttatctgactcagacttccacaacagtaaacagttttcaaatgacgtctacacctccagcgtggggaagccgtttccctgtgagtcctccgcagggcagagccatgcggctctcctggagccctacttcccccaggagccctacggagactaccggcctccggcgctgacgcccaacgcgggctctctgttcagcgcctcgcccctaccgccgctcctgccaccgcccttccccggagacccagctcacttcctatttagggactcatgggagcagacgttgcctgacggtctcagccagcctgaccctgtgtctgccgatgccctgctgaccttgccacccagcacgagttgcctctcccagcttgagtccgggagcatcgcccagcacaggggctcaagctgggggtcatccctggctggggctcagtcatactcgctgcatgctctggaagatctgcaccacactccggggtaccctaccccgcctccttaccccttcacccctttcatgacggtgtcaaatgacctaccgcccaaggtggggccactctccccagatgaggaagcagacaccggttccctccatgacccttccccttgggtgaaagaagatgggagtattgcctgggggtcatatgaatgccgcagagcttattgaggggagggccaaatgacttctgggtttttctttaacttgaggtgtattccaaagattgttttaggtgtgtcagcccattcaggactggattttcagaataagcctcaatgctgctctttgttagtggacgagggcatttatttgtaatcctctccactgtaaccccactgaaataaaacagaatgttaattaaa

SEQ ID NO: 48413 - DNA, 3198 bp, Homo Sapiens
ttaacttttacacttagttgtccatttctccaaaatatgaagtcctctgcggaagtgactccagaccttcagagccgtggtgaactttgtgaattactggaaaccacaagtgaaagcaatcttgaagattcaatagcagttggtcctatagtgccagaaatggcacagggtgaagcccagtggtttcaagaggcaaagaatctgaatgagcagctgagagcagcttataccagcgccagtttccgccacatgtctttgcttgatatctcttccgatctggccacggaccacttgctgggctgtgatctgtctattgcttcaaaacacatcagcaaacctgtgcaagaacctctggtgctgcctgaggtctttggcaacttgaactctgtcatgtgtgtggagggtgaagctggaagtggaaagacggtcctcctgaagaaaatagcttttctgtgggcatctggatgctgtcccctgttaaacaggttccagctggttttctacctctcccttagttccaccagaccagacgaggggctggccagtatcatctgtgaccagctcctagagaaagaaggatctgttactgaaatgtgcatgaggaacattatccagcagttaaagaatcaggtcttattccttttagatgactacaaagaaatatgttcaatccctcaagtcataggaaaactgattcaaaaaaaccacttatcccggacctgcctattgattgctgtccgtacaaacagggccagggacatccgccgatacctagagaccattctagagatcaaagcatttcccttttataatactgtctgtatattacggaagctcttttcacataatatgactcgtctgcgaaagtttatggtttactttggaaagaaccaaagtttgcagaagatacagaaaactcctctctttgtggcggcgatctgtgctcattggtttcagtatccttttgacccatcctttgatgatgtggctgttttcaagtcctatatggaacgcctttccttaaggaacaaagcgacagctgaaattctcaaagcaactgtgtcctcctgtggtgagctggccttgaaagggtttttttcatgttgctttgagtttaatgatgatgatctcgcagaagcaggggttgatgaagatgaagatctaaccatgtgcttgatgagcaaatttacagcccagagactaagaccattctaccggtttttaagtcctgccttccaagaatttcttgcggggatgaggctgattgaactcctggattcagataggcaggaacatcaagatttgggactgtatcatttgaaacaaatcaactcacccatgatgactgtaagcgcctacaacaattttttgaactatgtctccagcctcccttcaacaaaagcagggcccaaaattgtgtctcatttgctccatttagtggataacaaagagtcattggagaatatatctgaaaatgatgactacttaaagcaccagccagaaatttcactgcagatgcagttacttaggggattgtggcaaatttgtccacaagcttacttttcaatggtttcagaacatttactggttcttgccctgaaaactgcttatcaaagcaacactgttgctgcgtgttctccatttgttttgcaattccttcaagggagaacactgactttgggtgcgcttaacttacagtactttttcgaccacccagaaagcttgtcattgttgaggagcatccacttctcaatacgaggaaataagacatcacccagagcacatttttcagttctggaaacatgttttgacaaatcacaggtgccaactatagatcaggactatgcttctgcctttgaacctatgaatgaatgggagcgaaatttagctgaaaaagaggataatgtaaagagctatatggatatgcagcgcagggcatcaccagaccttagtactggctattggaaactttctccaaagcagtacaagattccctgtctagaagtcgatgtgaatgatattgatgttgtaggccaggatatgcttgagattctaatgacagttttctcagcttcacagcgcatcgaactccatttaaaccacagcagaggctttatagaaagcatccgcccagctcttgagctgtctaaggcctctgtcaccaagtgctccataagcaagttggaactcagcgcagccgaacaggaactgcttctcaccctgccttccctggaatctcttgaagtctcagggacaatccagtcacaagaccaaatctttcctaatctggataagttcctgtgcctgaaagaactgtctgtggatctggagggcaatataaatgttttttcagtcattcctgaagaatttccaaacttccaccatatggagaaattattgatccaaatttcagctgagtatgatccttccaaactagtaaaattaattcaaaattctccaaaccttcatgttttccatctgaagtgtaacttcttttcggattttgggtctctcatgactatgcttgtttcctgtaagaaactcacagaaattaagttttcggattcattttttcaagccgtcccatttgttgccagtttgccaaattttatttctctgaagatattaaatcttgaaggccagcaatttcctgatgaggaaacatcagaaaaatttgcctacattttaggttctcttagtaacctggaagaattgatccttcctactggggatggaatttatcgagtggccaaactgatcatccagcagtgtcagcagcttcattgtctccgagtcctctcatttttcaagactttgaatgatgacagcgtggtggaaattgccaaagtagcaatcagtggaggtttccagaaacttgagaacctaaagctttcaatcaatcacaagattacagaggaaggatacagaaatttctttcaagcactggacaacatgccaaacttgcaggagttggacatctccaggcatttcacagagtgtatcaaagctcaggccacaacagtcaagtctttgagtcaatgtgtgttacgactaccaaggctcattagactgaacatgttaagttggctcttggatgcagatgatattgcattgcttaatgtcatgaaagaaagacatcctcaatctaagtacttaactattctccagaaatggatactgccgttctctccaatcatt

SEQ ID NO: 48414 - DNA, 1829 bp, Homo Sapiens
aggagatcctggggccttacctactagcggaatcgactgaagagacgcctgccagtgcgggaggtaggaagctcgatccccaaagaaaagagcgagtgggcaggcagctgcgagacagaaccggagtgtgcagggtccctagaggccggttcctggtctgtgctgctctcctggaagccatggtacaggcagagctcagggcgatccccaggtgagggcagcggctctgcctgggattccaccgcagtacaaccgggtagatgcggggtggagaagaaaggatgttgcctgcactgctcgccaatagcaccctgagaggctacatttgcagaagcagcagcagcagaagacacagcgccggtccaggaggcggctcgagctgttcgtaaagtcgcccgacagctttttctccgtagtatgcgagttgacaaaacagccagagaacagggctccccattacaatcttttcgagatcttttcccttgctaaccggatctgatttgtgcgaaaacatgccttgcacttgtacctggaggaactggagacagtggattcgacctttagtagcggtcatctacctggtgtcaatagtggttgcggttcccctatgcgtgtgggaattacagaaactggaggttggaatacacaccaaggcttggtttattgctggaatctttttgctgttgactattcctatatcactgtgggtgatattgcaacacttagtgcattatacacaacctgaactacaaaaaccaataataaggattctttggatggtacctatttacagtttagatagttggatagctttgaaatatcccggaattgcaatatatgtggatacctgcagagaatgctatgaagcttatgtaatttacaactttatgggattccttaccaattatctaactaaccggtatccaaatctggtattaatccttgaagccaaagatcaacagaaacatttccctcctttatgttgctgtccaccatgggctatgggagaagtattgctgtttaggtgcaaactaggtgtattacagtacacagttgtcagacctttcaccaccatcgttgctttaatctgtgagctgcttggtatatatgacgaagggaactttagcttttcaaatgcttggacttatttggttataataaacaacatgtcacagttgtttgccatgtattgtctcctgctcttttataaagtactaaaagaagaactgagcccaatccaacctgttggcaaatttctttgtgtaaagctggtggtttttgtttctttttggcaagcagtagttattgctttgttggtaaaagttggcgttatttctgaaaagcatacgtgggaatggcaaactgtagaagctgtggccaccggactccaggattttattatctgtattgagatgttcctcgctgccattgctcatcattacacattctcatataaaccatatgtccaagaagcagaagagggctcatgctttgattcctttcttgccatgtgggatgtctcagatattagagatgatatttctgaacaagtaaggcatgttggacggacagtcaggggacatcccaggaaaaaattgtttcccgaggatcaagatcaaaatgaacatacaagtttattatcatcatcatcacaagatgcaatttccattgcttcttctatgccaccttcacccatgggtcactaccaagggtttggacacactgtgactccccagactacacctaccacagctaagatatctgatgaaatccttagtgatactataggagagaaaaaagaaccttcagataaatccgtggattcctga

SEQ ID NO: 48415 - DNA, 210 bp, Homo Sapiens
gtgaaggccagaaaaaacagatttggccatattgggggcctggtcaccagggatgccaactctggcaaagtggatattgtcactatcaatgacctcaactacatggtctccatgttccagtatgattccgctcatggcaagttccacggcaccatcaaggctgagaacgggaagcctgccatcaatgacaatcccatcaccatctcgcag

SEQ ID NO: 48416 - DNA, 386 bp, Homo Sapiens
atgattcagatatatctgtcattgcccagaacaagaaatgctttgacaacgatattgtttgttctaaaagtgttttgatttcagttggggacactgaaatttacctgaatgatactccttacaaacaggttagtttttttctggaaaacaaatctacctaccagctttggaaggctggttactatatagtagtatactttccagagaaagatatcactattctttgggataggaagacaactattcatatcaaagttgggccacagtggaagaacaagctatcaggattgtgtggaaactttgacaaatgcacttcaaatgatatgaccacatctaataacttggaagtgagaaatgctcgggtatttggagatagttgggcatta

SEQ ID NO: 48417 - DNA, 786 bp, Homo Sapiens
atatattcccgtgtgccagagtgccaggtcaccacatactattatgttgggtttgcatatttgatgatgtgtcactaccaggatgccatccgggtctttgccaacatcctcctctacatccagaggaccaagagcatgttccagaggaccacatacaagtatgagatgattaacaagcagaatgagcagatgcatgcactgctggccattgccctcacgatgtaccccatgagtattgatgagagcattcacctccagcggtgggataaatacagcaacaagatgctgtgcatgcagaaaggtgacccagaagtctatgaagaacttttcagttacttctgccccaagttcctgtcgcctgtagtgcccaactacgataatgtgcaccccaactaccacaaagagcccttcctgcagcagccgaaggtgttttctgatgaagtacagcagcaggcccagctttcaaccatccgcagcttcctcaagctctacaccaccatgcctgtggccaagctggctggcttcctggacctcacagagcaggagttcaggatccagcttcctgtcttcaaacacaaattgaagaacctggtgtggaccagcagcatcacaaccctggatgatgaatttcagtcagcctcagaggttgacttctacattgataaggacatgatccacatcatggacaccaaggtcgccaggcgctatgggaatttcttcatccgtcagatccacagattcgaggagcttaatcgaaccctgaagaagatgggacagagaccctga

SEQ ID NO: 48418 - DNA, 1797 bp, Homo Sapiens
atggaaaactcctctgcagcatcagcctcctcggaggcagggagcagccgctcccaggagatcgaggagctggagcgcttcatcgacagctacgtgctggagtaccaggtgcaggggctgctggctgacaagacggagggtgatggcgagagcgagaggacccagtcccacatctcccagtggacagcggactgcagcgaaccgctggacagcagctgttccttctcccgagggcgagcccccccacagcagaatggcagcaaagacaactctctggacatgctgggcacggacatctgggcggccaacaccttcgattccttcagtggtgccacctgggacctgcagccggaaaagctggacttcacccagttccaccgcaaagtccgacacacgcccaagcagcccctgccacacatcgaccgcgaagggtgtggcaaagggaagctggaagatggggatggcatcaacctgaatgacatcgagaaggtccttccagcctggcagggctaccacccgatgccccatgaagtggagatcgcacacaccaagaagctgttccgcaggaggagaaatgatcgaaggcggcagcagagacctccggggggcaacaagccccaacagcatggtgaccaccagccaggcagtgccaaacacaacagggaccaccagaaatcctaccaggggggctcagcaccccacccctcagggaggcccactcaccatggctacagccagaaccggcgctggcaccatggcaacatgaagcacccaccaggcgacaagggggaggcaggcgcacaccgcaatgccaaagagaccatgaccatcgagaacccaaaactggaggacactgcaggggacaccgggcacagcagccttgaggccccccgcagccctgacaccctggccccggtggcttctgagcggctgcccccacagcagtcaggggggccagaggttgagacaaaacgtaaagacagtattcttcccgagcgcatcggggagcggcccaaaattaccctgctccagtcttccaaagacagactgcggcgaaggctaaaggaaaaggatgaagtggccgtggagacgaccactccccagcagaacaagatggacaagctgatcgagatcctgaacagcatgcggaacaacagcagcgacgtggacaccaagctcaccaccttcatggaggaggcccagaactccaccaactccgaggagatgctgggcgagatcgtgcgcacaatctaccagaaggctgtgtccgaccgcagcttcgccttcaccgctgccaagctctgcgacaagatggcgctctttatggtggaggggaccaagttccggagcctgctcctcaacatgctgcagaaggacttcacggtgcgcgaggagctgcagcagcaggacgtggagcgctggctgggcttcatcaccttcctgtgcgaggtcttcggcaccatgcgcagcagcacaggcgagcccttccgtgtgctcgtgtgccccatctacacctgcctcagggagctcttgcaatctcaggatgtgaaggaagatgctgtcctttgctgctctatggagctgcagagtacaggccggctgctggaggaacagctgcctgagatgatgacagagctcctggccagcgcacgggacaagatgctgtgcccctcggagtccatgctgacccggtcgctgctcctagaggtcatcgagctccacgctaacagctggaaccctctgacgccccccatcacgcagtactacaacagaaccatccagaaactgacagcctga

SEQ ID NO: 48419 - DNA, 1068 bp, Homo Sapiens
atgacccaggcaggccggcggggtcctggcacacccgagccgcgtccgcgaacacagcccatggcctccccgcgcctagggaccttctgctgccccacgcgggacgcagccacgcagctcgtgctgagcttccagccgcgggccttccacgcgctctgcctgggcagcggcgggctccgcttggcgctgggccttctgcagctgctgcccggccgccggcccgcgggccccgggtcccccgcgacgtccccgccggcctcggtccgcatcctgcgcgctgccgctgcctgcgaccttctcggctgcctgggtatggtgatccggtccaccgtgtggttaggattcccaaattttgttgacagcgtctcggatatgaaccacacggaaatttggcctgctgctttctgcgtggggagtgcgatgtggatccagctgttgtacagtgcctgcttctggtggctgttttgctatgcagtggatgcttatctggtgatccggagatcggcaggactgagcaccatcctgctgtatcacatcatggcgtggggcctggccaccctgctctgtgtggagggagccgccatgctctactacccttccgtgtccaggtgtgagcggggcctggaccacgccatcccccactatgtcaccatgtacctgcccctgctgctggttctcgtggcgaaccccatcctgttccaaaagacagtgactgcagtggcctctttacttaaaggaagacaaggcatttacacggagaacgagaggaggatgggagccgtgatcaagatccgatttttcaaaatcatgctggttttaattatttgttggttgtcgaatatcatcaatgaaagccttttattctatcttgagatgcaaacagatatcaatggaggttctttgaaacctgtcagaactgcagccaagaccacatggtttattatgggaatcctgaatccagcccagggacttgtctttggccttctacggctggacaggatgcagcctgggttttcagtctcccaggaaggagatccagtgggaatcactgaccacctcggctgctga

SEQ ID NO: 48420 - DNA, 1987 bp, Homo Sapiens
gggagggcacaacagctgctacctgaacagtttctgacccaacagttacccagcgccggactcgctgcgccccggcggctctagggacccccggcgcctacacttagctccgcgcccgaggagaatgttggaccgacgacacaagacctcagacttgtgttattctagcagctgaacacaccccaggctcttctgcccggcagtggctctggaagcagtctggtgtatagagttatggattcactaccagattctactgtatgctcttgacaactatgaccacaatggtccacccacaaatgaattatcaggagtgaacccagaggcacgtatgaatgaaagtcctgatccgactgacctggcgggagtcatcattgagctcggccccaatgacagtccacagacaagtgaatttaaaggagcaaccgaggaggcacctgcgaaagaaagcccacacacaagtgaatttaaaggagcagcccgggtgtcacctatcagtgaaagtgtgttagcacgactttccaagtttgaagttgaagatgctgaaaatgttgcttcatatgacagcaagattaagaaaattgtgcattcaattgtatcatcctttgcatttggactatttggagttttcctggtcttactggatgtcactctcatccttgccgacctaattttcactgacagcaaactttatattcctttggagtatcgttctatttctctagctattgccttattttttctcatggatgttcttcttcgagtatttgtagaaaggagacagcagtatttttctgacttatttaacattttagatactgccattattgtgattcttctgctggttgatgtcgtttacattttttttgacattaagttgcttaggaatattcccagatggacacatttacttcgacttctacgacttattattctgttaagaatttttcatctgtttcatcaaaaaagacaacttgaaaagctgataagaaggcgggtttcagaaaacaaaaggcgatacacaagggatggatttgacctagacctcacttacgttacagaacgtattattgctatgtcatttccatcttctggaaggcagtctttctatagaaatccaatcaaggaagttgtgcggtttctagataagaaacaccgaaaccactatcgagtctacaatctatgcagtgaaagagcttacgatcctaagcacttccataatagggtcgttagaatcatgattgatgatcataatgtccccactctacatcagatggtggttttcaccaaggaagtaaatgagtggatggctcaagatcttgaaaacatcgtagcgattcactgtaaaggaggcacagatagaacaggaactatggtttgtgccttccttattgcctctgaaatatgttcaactgcaaaggaaagcctgtattattttggagaaaggcgaacagataaaacccacagcgaaaaatttcagggagtaaaaactccttctcagaagagatatgttgcatattttgcacaagtgaaacatctctacaactggaatctccctccaagacggatactctttataaaacacttcattatttattcgattcctcgttatgtacgtgatctaaaaatccaaatagaaatggagaaaaaggttgtcttttccactatttcattaggaaaatgttcggtacttgataacattacaacagacaaaatattaattgatgtattcgacggtctacctctgtatgatgatgtgaaagtgcagtttttctattcgaatcttcctacatactatgacaattgctcattttacttctggttgcacacatcttttattgaaaataacaggctttatctaccaaaaaatgaattggataatctacataaacaaaaagcacggagaatttatccatcagattttgccgtggagatactttttggcgagaaaatgacttccagtgatgttgtagctggatccgattaa

SEQ ID NO: 48421 - DNA, 2173 bp, Homo Sapiens
tcctggcggagccatggctgcgcagcgggctggccgggggtctcctgaacccgggccccgccgccccgaccgcccggccccgccgccggggctgtccccgccgcgtccgtagcgcgtcctgccagggctgaaatctctttaatgatggagggaagcaggcagacgcgagtgtctcggccatacaagatcagcgaatcatcaaaggtataccgctgggccgaccactcaagcacggtgctgcagcggctgaacgagcagcgtctccgcgggctcttctgcgacgtcgtcctggtggccgatgagcagcgtgtgccagcccatcgcaacctgctggccgtgtgcagcgactacttcaactccatgttcaccatcggcatgcgggaagctttccagaaggaggtggagctgatcggcgcctcctacattgggctcaaggccgtggtggacttcctgtacggcggggagctggtgctggatggcggcaacattgactacgtcctggagacggctcacctgctgcagatctggacggtggtagacttctgctgtgagtacctggagcaggaggtgagcgaggacaactacctgtacctgcaggagctggcctccatctacagcctcaagcggcttgatgccttcatcgatggcttcatcctgaaccacttcggcacgctgtcctttacgcccgacttcctgcagaacgtctccatgcagaagctgtgtgtctacctgagcagcagcgaggtgcagcgggagtgtgagcacgacctcctgcaggccgccctgcagtggctgacgcagcagcccgagcgcgaggcccacgcccgccaggtgctggagaacatccacttcccgctcatccccaagaacgacctgctgcaccgcgtcaagccggccgtgtgctcgctgctgcccaaggaggccaactgcgagggcttcatcgaggaggccgtgcgctaccacaacaacctggcggcccagcccgtcatgcagaccaagcgcacggcgctgcgcaccaaccaggagcgcctgctgtttgtgggcggcgaggtctccgagcggtgtctggagctcagtgacgacacctgctacctggacgccaagagcgagcagtgggtcaaagagacgccgctgcccgcccggcggagccaccactgtgtcgcggtgctggggggcttcatcttcatcgccggcggcagcttctcacgggacaacggaggggatgcggcctccaatcttctttataggtatgacccccgctgtaaacagtggatcaaggtggcctccatgaaccagcgccgtgtggatttctaccttgcctccatcgaagacatgctggtggccatcggcggccggaatgagaacggagcgctctcttcagtagagacgtacagtcccaagactgactcctggtcctatgtggccggcttgccaaggttcacgtacggccacgcgggcaccatctacaaagacttcgtgtacatctcggggggccacgactaccaaattggcccctaccgcaagaacctgctatgctacgaccaccggacagacgtgtgggaggagcggcggcccatgaccacggcgcgcggctggcacagcatgtgcagcctgggtgacagcatctactccatcgggggcagcgatgacaacatcgagtccatggagcgcttcgacgtgctgggcgtggaggcctacagcccgcagtgcaaccagtggacccgcgtggcgccgctgctgcacgccaacagcgagtcgggcgtggcagtgtgggagggccgcatctacatcctgggcggctacagctgggagaacactgccttctccaagaccgtgcaggtgtacgaccgcgaggccgacaagtggagcaggggcgtcgacctgcccaaggccatcgctggcgggtccgcctgtgtctgcgccctggagccacggccagaggacaagaagaagaaaggcaaaggcaagaggcaccaggaccggggccagtgaccctagctgcgcctcttgggaccatcctcaccgtcacctcccagggctctgtagaccagcagcaacttcttagtattccggaaacattatgtacaacttagcagctttttttacttttatgattcttggtatttctatgatatcacagtaaccaattaaatactatctgtaactttacata

SEQ ID NO: 48422 - DNA, 3714 bp, Homo Sapiens
agggaatgtgcagcaatcagttaaccgcaaacagagctggaaaggttctaaagaatccttagttcctcagaggcatggcccgccactaggagaaagtgtggcctatcattctgagagtcccaactcacagacagatgtaggaagacctttgtctggatctggtatatcagcatttgttcaagctcaccctagcaacggacagagagtgaaccccccaccaccacctcaagtaaggagtgttactcctccaccacctccaagaggccagactccccctccaagaggtacaactccacctcccccttcatgggaaccaaactctcaaacaaagcgctattctggaaacatggaatacgtaatctcccgaatctctcctgtcccacctggggcatggcaagagggctatcctccaccacctctcaacacttcccccatgaatcctcctaatcaaggacagagaggcattagttctgttcctgttggcagacaaccaatcatcatgcagagttctagcaaatttaactttccatcagggagacctggaatgcagaatggtactggacaaactgatttcatgatacaccaaaatgttgtccctgctggcactgtgaatcggcagccaccacctccatatcctctgacagcagctaatggacaaagcccttctgctttacaaacagggggatctgctgctccttcgtcatatacaaatggaagtattcctcagtctatgatggtgccaaacagaaatagtcataacatggaactatataacattagtgtacctggactgcaaacaaattggcctcagtcatcttctgctccagcccagtcatccccgagcagtgggcatgaaatccctacatggcaacctaacataccagtgaggtcaaattcttttaataacccattaggaaatagagcaagtcactctgctaattctcagccttccgctacaacagtcactgcaattacaccagctcctattcaacagcctgtgaaaagtatgcgtgtattaaaaccagagctacagactgctttagcacctacacacccttcttggataccacagccaattcaaactgttcaacccagtccttttcctgagggaaccgcttcaaatgtgactgtgatgccacctgttgctgaagctccaaactatcaaggaccaccaccaccctacccaaaacatctgctgcaccaaaacccatctgttcctccatacgagtcaatcagtaagcctagcaaagaggatcagccaagcttgcccaaggaagatgagagtgaaaagagttatgaaaatgttgatagtggggataaagaaaagaaacagattacaacttcacctattactgttaggaaaaacaagaaagatgaagagcgaagggaatctcgtattcaaagttattctcctcaagcatttaaattctttatggagcaacatgtagaaaatgtactcaaatctcatcagcagcgtctacatcgtaaaaaacaattagagaatgaaatgatgcgggttggattatctcaagatgcccaggatcaaatgagaaagatgctttgccaaaaagaatctaattacatccgtcttaaaagggctaaaatggacaagtctatgtttgtgaagataaagacactaggaataggagcatttggtgaagtctgtctagcaagaaaagtagatactaaggctttgtatgcaacaaaaactcttcgaaagaaagatgttcttcttcgaaatcaagtcgctcatgttaaggctgagagagatatcctggctgaagctgacaatgaatgggtagttcgtctatattattcattccaagataaggacaatttatactttgtaatggactacattcctgggggtgatatgatgagcctattaattagaatgggcatctttccagaaagtctggcacgattctacatagcagaacttacctgtgcagttgaaagtgttcataaaatgggttttattcatagagatattaaacctgataatattttgattgatcgtgatggtcatattaaattgactgactttggcctctgcactggcttcagatggacacacgattctaagtactatcagagtggtgaccatccacggcaagatagcatggatttcagtaatgaatggggggatccctcaagctgtcgatgtggagacagactgaagccattagagcggagagctgcacgccagcaccagcgatgtctagcacattctttggttgggactcccaattatattgcacctgaagtgttgctacgaacaggatacacacagttgtgtgattggtggagtgttggtgttattctttttgaaatgttggtgggacaacctcctttcttggcacaaacaccattagaaacacaaatgaaggttatcaactggcaaacatctcttcacattccaccacaagctaaactcagtcctgaagcttctgatcttattattaaactttgccgaggacccgaagatcgcttaggcaagaatggtgctgatgaaataaaagctcatccattttttaaaacaattgatttctccagtgacctgagacagcagtctgcttcatacattcctaaaatcacacacccaacagatacatcaaattttgatcctgttgatcctgataaattatggagtgatgataacgaggaagaaaatgtaaatgacactctcaatggatggtataaaaatggaaagcatcctgaacatgcattctatgaatttaccttccgaaggttttttgatgacaatggctacccatataattatccgaagcctattgaatatgaatacattaattcacaaggctcagagcagcagtcggatgaagatgatcaaaacacaggctcagagattaaaaatcgcgatctagtatatgtttaacacactagtaaataaatgtaatgaggatttgtaaaagggcctgaaatgcgaggtgttttgaggttctgagagtaaaattatgcaaatatgacagagctatatatgtgtgctctgtgtacaatattttattttcctaaattatgggaaatccttttaaaatgttaatttattccagccgtttaaatcagtatttagaaaaaaattgttataaggaaagtaaattatgaactgaatattatagtcagttcttggtacttaaagtacttaaaataagtagtgctttgtttaaaaggagaaacctggtatctatttgtatatatgctaaataattttaaaatacaagagtttttgaaatttttttgaaagacagttttagttttatcttgctttaaccaaatatgaaacataccccctattttacagagctcttttttcccctcataacctcgtttttggtagaaaataagctagagaaattaagccatcgtgttggtgagtgttcctaggctaatgataatctgtataattcacatcctgaaactaaggaatacagggttgaaaaaatattaatatgtttgtcagaaggaaaaataatgcatttatcttccccccccaccccccgccccatggaatatttaatctatttaatcttcttgcatttatttctcaagaattactggctttaaaagaagccaaagcactactagctttttttccatattggtatttttgatgctgcttccaattttaaaagggaacaaagctgccataaatcgaaatgttcaatactaaaagctaaaatatttctcaccatc

SEQ ID NO: 48423 - DNA, 1353 bp, Homo Sapiens
gaattcacccgggaggagtggcagcacctgggccctgtcgagaggacgctgtacagagatgtgatgctggagaactacagccacctcatctcagtgggatattgcattactaaacccaaggtgatctccaagttggagaaaggagaagagccatggtatttagaagatgaattcctgaaccagaggtacccagggtattttaaagttgatcacatcaaagggatccgggaaaaacaagaaaaacttctgtggcaagaaatattcatcagtgatgctgacaaaacattgagtaaagaaggacagaaagttttagaaaaaccatttaatctggaaatagctccagagctttcagaaaaaatatcctgtaaatgtgactcacacagaatgaatttgccagttgcttctcaattaattataagtgaaagaaaatattcaagaaagaagactgaatacatgaatgtgtgtgagaaactgcagcttgatattaagcatgagaaagctcatgctgaagagaaatcttatgaacatggtgaaaatgctaaagctttcagttataagaaagatcagcattggaaatttcaaactttggaggaatcttttgaatgtgatggatctggacaaggtttatatgataagacaatctgtattacacctcagagttttctaacaggagaaaagtcctgtaaggatgatgaatttagaaaaaactttgataaaatcactttatttaaccacatgagaactgacacaagggggaaatgctctgatcttaatgaatatgggacatcctgtgacaaaaccaccgctgttgaatacaataaagttcacatggctatgacacactatgagtgtaatgaaagggggattaatttcagtaggaagtcacccctcactcaatctcagagaactattacaggatggagtgcttttgaaagcaataaatgtgaagaaaattttagccagagctcagcccatatagtacatcagaaaacacaagctggagataaatttggtgaacataatgaatgtacagatgccctctaccagaaattagactttacagcacatcagagaattcacacagaagataaattctacctttctgatgaacatgggaaatgcagaaaatccttttaccggaaagcacacctcattcagcatcagaggccccactcaggagagaaaacttaccaatatgaggaatgtgcaaaatccttttgttcaagttcacatcctattcagcatcctggaacttatgtgggattcaaactttatgaatgtaatgaatgtgggaaagctttctgtcagaattcaaacctcagtaaacatctgagaattcacacaaaagagaaa

SEQ ID NO: 48424 - DNA, 930 bp, Homo Sapiens
attgtcttctctgtgcttctgttttgtgaatttttaatctattacttagtgatcttttggtgtaattggcctgaagcgaaaaccgcagcctatgatggtgaacaggccacgtgtgagcctgtgctcaaagccatgtttttggctgacacccacttgcttagggaattcctaggtcactggctggacaaattacgaagggaatggcaggtggagagagccttccagacagctctgtggttgctgcagccggaagtcgtcttcatcctggaggatgtctttgatgaagggaagtggagcacctctgaggcctgggtggatgatgtggagcagtttcggaaaatgttcagacacccaagtcatgtgcagctgaaggtagttgctggaaaccatgacactggcttccactatgagacgaacacatacgaagtagaacggtttgagaaagtgttcatctctgaaagcctgtttttggaaaggattaacttcatgatggtcaacagcatggcactgaagggggacagctgtggcatctgttctgaagcagaagcagagctcactgaagtttcttacagactgaactgctcccaagagcgttatcctctgtattggagaagcgacactaactgttctggggaagatgttgctcctccggaggaaaagaacaccccattaaggagaattatgatgtgctttctcgggaggcatcgcaaaagctgctgtgttgactccagccacacctggtcctcagcggccacacgcacagcaatccccgagctcagcctctcatctttcagttggaggaacagaaacaaccccagtttcattatgggtagcatcacacccacagactatgccctctccaagtgccacctaccacctgaggacgtggtcttgatcatctactgtggagtggtgggcttccttgtggtt

SEQ ID NO: 48425 - DNA, 825 bp, Homo Sapiens
atggaaacaatgaaaggtattgttgcagcatctggcagtgagacggaggatgacgattccatggacattcccttggaccttccttcatcctctggctcaggcaagagaaggagaaggggcaacctgcccaaggagtctgtgcagattcttcaagattggctgtatgagcaccattacaatgtccatccttccgagcaagaaaaagcactgttgtcccagcaaacatatctgtctacactacaggtctgtaactggttcatcaacgcccgccacaagcttctcaattgtacgcatcctgacatgctgagaaaggatggcaaagatccaaatcagttcacaattacctgccgtgggcccaagatttctgaaacaagctctgtgaagtttgtgatgggcatcaaaaacttcatgccagctctagaggagaccccatttcattcctgtacatctgggccaaacccaaccctagggaggccattgtctcctaagccgtcttccccaggatcagttttggctcgtccatcagtgatctgccatgccactgtgactgcattgaaagatccctttctctgccagtcagttggtgtgggacaaaacacagatatacagcaggtagcagccaacaactttacagacacctctctcatgtgcccagaggacatgtgtaaatctagaccaagtaccaatacacagagtagtcttttcaacactcctccccctactccaatggatctcaaccaggactttagtggatttcagcttctagtgaatgttgcactcaaacgggttggagagacagagcttcagccgaaacttacagcttaa

SEQ ID NO: 48426 - DNA, 438 bp, Homo Sapiens
atgaaagagaaactcagcaagaaaagggcagaggtcaaaggcaacagaagctggttggaagaatttcttaaacccagtgacaacgaagaaggccctccaccgaagaataaggttttatccaacaatgcaagcagccaaaagccgactcactcaagctgcataccattgttgaggctgcctgataagcagcagaaagttaatgagagcattaagacagacatgctgtgcacagacaaggaagaggagtgccctgctgcctccctgctgcagaaatacaccaataacagtgagaagccatctgggaagagacaatgcaaaaccaagcacttgatatctcaggacctgaggcaggggttcctgctaacagggaagtgctacgttgagaatgctgatggcaagatacctcttggcacttgttttctccttgggcttatatag

SEQ ID NO: 48427 - DNA, 769 bp, Homo Sapiens
ggccacaccgtggagctgccctgcaccgcctcgggctaccctatccccgccatccgctggctcaaggatggccggcccctcccggctgacagccgctggaccaagcgcatcacagggctgaccatcagcgacttgcggaccgaggacagcggcacctacatttgtgaggtcaccaacaccttcggttcggcagaggccacaggcatcctcatggtcattgatccccttcatgtgaccctgacaccaaagaagctgaagaccggcattggcagcacggtcatcctctcctgtgccctgacgggctccccagagttcaccatccgctggtatcgcaacacggagctggtgctgcctgacgaggccatctccatccgcgggctcagcaacgagacgctgctcatcacctcggcccagaagagccattccggggcctaccagtgcttcgctacccgcaaggcccagaccgcccaggactttgccatcattgcacttgagggcccacccagcatccgggctatgcggaacatcacagcagtcgccgggcgggacacccttatcaactgcagggtcatcggctatccctactactccatcaagtggtacaaggatgccctgctgctgccagacaaccaccgccaggtggtgtttgagaatgggaccctcaagctgactgacgtgcagaagggcatggatgagggggagtacctgtgcagtgtcctcatccagccccagctctccatcagccagagcgttcacgtagccgtcaaag

SEQ ID NO: 48428 - DNA, 849 bp, Homo Sapiens
gatgtccttaagttccttgcagcaggaacccacttaggtggcaccaatcttgacttccagatggaacagtacatctataaaaggaaaagtgatggcatctatatcataaatctgaagaggacctgggagaagcttctgctggcaggtcgtgctattgttgccattgaaaaccctgctgatgtcagtgttatatcctccaggaatactggccagagggctgtgctgaaatttgctgctgccactggagccactccaattgctggccgcttcactcctggaaccttcactaaccggatccaggcagccttccgggagccacggcttgttgtggttactgaccccagggctgaccaccagcctctcacagaggcatcttatgttaacctacctaccattgcgctgtgtaacacagattctcctctgtgctatgtggacattgccatcccatgcaacaacaagggaactcactcagtgggtttgatgtggtggatgctggctcgggaagttctgcgcatgtgtggcaccatttcccgtgaacacccatgggaggtcatgcctgatctgtacttcgacagagatcctgaagagattgaaaaagaagagcaggctgctgctgagaaggcagtgaccaaggaggaatttcagggtgaatggactgctccagctcctgagttcactgctactcagcctgaggttgcagactggtctgaaggtgtacaggtgccctctgtgcctattcagcaattccctactgaagactggagcgctcagcctgccacggaagactggtctgcagctcccactgctcaggccactgaatgggtaggagcaaccactgactggtcttaa

SEQ ID NO: 48429 - DNA, 880 bp, Homo Sapiens
tggagccgggatccgccctaggggctcggatcgccgcgcgctcgccgctcgcccgccagcccgcccgtggtccgtggcggcgcgctccacccggcacggggaggcgcggggcgcaccatggccgcagacacgccggggaaaccgagcgcctcgccgatggcaggagcgccggccagcgccagccggaccccagacaagccccggagcgcggccgagcaccgcaagtcctccaagccggtcatggagaagcggcgccgagcgcgtattaacgagagcctcgctcagctcaaaaccctcatcctggacgccctcagaaaagagagctcccgccactcgaagctggagaaggcggacatcctggagatgaccgtgagacacctgcggagcctgcgtcgcgtgcaggtgacggccgcgctcagcgccgaccccgccgttctgggcaagtaccgcgccggcttccacgagtgtctggcggaggtgaaccgcttcctggccggctgcgagggcgtcccggccgacgtgcgctcccgcctgctgggccacctggcagcctgcctgcgccagctgggaccctcccgccgcccggcctcgctgtccccggctgcccccgcagaggccccagcgcccgaggtctacgcgggccgcccgctgctgccatcgctcggcggccccttccctctgctcgcgccgccgctgctgccgggtctgacccgggcgctgcccgccgcccccagggcggggccgcagggcccgggtgggccctggaggccgtggctgcgctgaggctgtggccctgagactgcatcggaggcggcgccccgttctagggccgtggcctttgccgagactgtagcagagaaaacgtatttattattccaga

SEQ ID NO: 48430 - DNA, 696 bp, Homo Sapiens
tttgggagaaagttcgtgctcagatggtcttacctccagctcgccattgtaggcacctgtgcggcctttgctcccaccatcctcgtatactgctccctgcgcttcttggctggggctgctacatttagcatcattgtaaatactgttttgttaattgtagagtggataactcaccaattctgtgccatggcattgacattgacactttgtgctgctagtattggacatataaccctgggaagcctggcttttgtcattcgagaccagtgcatcctccagttggtgatgtctgcaccatgctttgtcttctttctgttctcaaggtggctggcagagtctgctcggtggctcattatcaacaacaaaccagaagagggcttaaaggaacttagaaaagctgcacacaggaatggaatgaagaatgctgaagacatcctaaccatggaggttttgaaatccaccatgaagcaagaactggaggcagcacagaaaaagcattctctttgtgaattgctccgcatacccaacatatgtaaaagaatctgtttcctgtcctttgtgaggtctgctggagtttgctggaggtccactccagatcctgtttgcttgggtatcaccagcggaggttgcagaacagcaaagattcctgcctgctccttcctctggaagcttcattttagaggagcacctgcctga

SEQ ID NO: 48431 - DNA, 1800 bp, Homo Sapiens
gcgaggcgtcgggatgcagcgccccgggcccttcagcaccctctacgggcgggtcttggccccgctgcccgggagggccgggggcgcggcctccggcggaggagggaacagctgggacctcccgggttcccacgtgcggctgccggggcgtgcacagtctgggacccgtggcggtgctggcaacacaagcaccagctgcggggactccaacagcatctgcccggccccctccacgatgtccaaggccgaggaggccaagaagctggcgggccgcgcggctgtggagaaccacgtgaggaataaccaagtgctgggaattggaagtggttctacaattgtccatgctgtgcagcgaatagctgaaagggtgaagcaagagaatctgaacctcgtctgtattcccacttccttccaggcccgccagctcatcctgcagtatggcttgaccctcagtgatctggatcgacacccagagatcgaccttgccatcgatggtgctgatgaagtagatgctgatctcaatctcatcaagggtggcggaggctgcctgacccaggagaagattgtggctggctatgctagtcgcttcatcgtgatcgctgatttcaggaaagattcgaagaatctcggggatcagtggcacaagggaatccccatcgaggtcatcccaatggcctatgtcccagtgagccgagctgtgagccagaagtttgggggcgtggttgaacttcgaatggctgtcaacaaggctggtcctgtggtgacagataatgggaattttatcttggactggaagtttgaccgggtacacaaatggagtgaagtgaatacagctatcaaaatgatcccaggtgtggtggacacaggcctattcatcaacatggctgagagagtctactttgggatgcaggatggctcagtgaacatgagggagaagcctttctgttgaccctgcaaggagcagagtgtgttcaccttgagtctccagcccacagccaaggtggacgtacctctccaggagcctttgccttaatgtatctctgcctggacaacttgtggtggggggtggggggaagagtgggagggggagttaaatccagtcttatgaagtattgttattaaatgtctttttaaaaagagaaatataaacatatatttttactattaaaatattcagttttttaaatgaagtagaacttgagttcatgttttatatgaaatatttaccaaaaaaaaaaaatgaggtaaactgtatttaaaacctttgacttgagtctgctggtaaagcttctgaatattgagtttgctgagaaataaaaatcaaaacttctttaagctggtaaagtgaggggcccaccagcagtgatctcctgatgccttactggaaactttgtttacttgtctgctaccctctgatttgtttttagttagtttttattgtgagcacacatagtacctagttacatcttaagatcaggtttataaaactgtggagtggagcggtatggtatggaatgacttggaatgtaagctgtcagggagaaaatgttgttacacttttgctaagatctgggggtttcttcatattcctgctgttggaagcagttgaccagaaatgcttgccagtactgccaaagcactgctgtgaaatgtgaagtactttgtttttttatttttaatgattttctttttgttattaatatttttctctgttcctttgttattacttgcatggtttggcgtcagaagtccttacctctttatattgtttgcaggtttaaataaaacagtgtggtgcca

SEQ ID NO: 48432 - DNA, 1484 bp, Homo Sapiens
gcgaggcggaagaaccccgatcgctgaggagcaagggggcgctaggaaagggaactgggttgcgacggtccggcgagagagagctggggtgctggggtgcggggaagttggggagcagaggccgcttggtgtccgagtagggtaagaccgcaccgacccagtccgttaggaaagaagggaaacgaggcaattgtcgggcggatccccggacggagggctaaggttgtgtggaaggcgctgctccccggatggcgaccgcagatactccggccccggcctccagtggcctctcgccgaaggaagaaggggagcttgaagatggggaaatcagtgacgacgataataacagccagatacggagtcggagcagcagcagcagcagcggcggcgggctgttaccctatccgcggcgaaggcctcctcactcggcccggggcggtggatctggcggaggcggtggctcttcctcgtcatcgtcctcttctcagcagcagctgaggaatttctcacgctcgcggcacgcgtctgagcggggccacctcaggggacccagcagctaccgacccaaagaaccgttccggtctcatccgccttctgtacggatgccttcgagctcactgtccgaaagcagtccccggccgtctttctgggagcggagccacctcgccttggaccgtttccgctttcgaggcaggccttaccggggtgggagtcgctggagtcgggggcgaggagtgggtgagcgaggaggcaagccggggtgcagacctcctctgggaggaggagcaggatccgggttcagcagcagtcagagctggcgagagccctctccacctcggaagagctccaaaagttttggaaggtctccatcaagaaaacaaaattattcatcaaaaaatgaaaactgtgtggaagaaacttttgaagatttgcttttaaagtataaacaaatacagttggaactagaatgcatcaataaggatgaaaaactagcattgagtagcaaagaagagaatgtgcaggaagatcctaaaacattgaacttcgaggaccaaactagcactgataatgtcagtattacaaaggattcaagtaaagaagtagctcctgaggagaaaacacaagtcaaaacttttcaggcatttgaattaaaaccactcaggcaaaaattgactttaccaggagataagaaccgtttgaaaaaagttaaagatggagcaaaaccactttccctgaaatccgacactactgattctagtcaaggtatcccttatcgggtaaaggagggttttactcctattcctggtttgaaattttcagcgtgaatggatgttgaagtttacaaaatctgttttcttcattattgggatgagcatctaatttattttaatttgttagtgtaatgaattatataatttatttctagtattaaaccacccttgtatgcttgcgtttaatacagtttatgatataccatttttaaa

SEQ ID NO: 48433 - DNA, 408 bp, Homo Sapiens
acagaagttggtgagatggcaaagcagtatatagagaaaagtcttttggttccagaccatgtgatcacatacctaatgatgtctgagttggagaataggtgtggccagcactggctcctcgatggttttcctaggacattaggacaagccgaagccctggacaaaatctgtgaagtggatctagtgatcagtttgaacattccatttgaaacacttaaacgtctcagccgccgttggattcaccctcctagcggaagggtatataacctggacttcaatccacctcatgttcatggtattgatactggtgaaccattagtccagcaggaggatgataaacctgaagcagttgctgccaggctaagacagtacaaagacatggcaaagccagtcattgaattatacaaa

SEQ ID NO: 48434 - DNA, 462 bp, Homo Sapiens
gtccccggcctcatgcccgccttgctgctcagcctgctggctggcccccaaaatgttgcagctaaatgtggtctctccttcgcctgccccaaaggattcaaatgctgtggcgacagctgctgccaggagaacgagttcttccctggccccttgaggatcttcgtcatcatcttcctggtcatcctgcctctcttgtgcatctgtggcctggctaagcgcttctgtcccaactgcagagacctggacccagacgccctgaaggattgccaggggccccgggaactgccctccatcatccccctagagagggtcagagcatccctctctactcccccacccccctacagtgagattctgaagcctactcggggccagagtcccacagagccaccccctccctacagcttcaggcctgaaaaatatactggggatcagagggccattgacagcccagccttctga

SEQ ID NO: 48435 - DNA, 675 bp, Homo Sapiens
gtcctgctgctgctcctctctgccctggtgacctccttcactgcagcctctatccacgatgctcatgcccaagagagctccttgggtcttacaggcctccagagcctactccaaggcttcagccgacttttcctgaaagatgacctgcttcggggcatagacagcttcttctctgcccccatggacttccggggcctccctaggaactaccaacaagaggagaacgaggagcaccagctgaggaacaacaccctctccagccacctccatattgacaaggtgaccgacaataagacaggagaggtgctgatctccgagaaggtggtggcatccatccagccggcggaggggagcttcgagggtaactggaaggtacccaggatggagcggcggcccgtgtccatccggaaggctatggacaacttccatgcagagctccatccccgggtggccttctggatcatgaagctgccacggtggaggtcccaccacaatgtcctggagggcggccgctggctcagtgagaagcgacaccgcctgcaggccatccaggatgggctccacgaggggacccgcgaggacgtcctaaaagaggggacccagggctcctcccactccgggctgctccgaaagacccacttactgtacatcttcaggctttcctggcagctatag

SEQ ID NO: 48436 - DNA, 939 bp, Homo Sapiens
atggatggagagaatcactcagtggtatctgagtttttgtttctgggactcactcattcatgggagatccagctcctcctcctagtgttttcctctgtgctctatgtggcaagcattactggaaacatcttcattgtgttttctgtgaccactgaccctcacttacactcccccatgtactttctactggccagtctctccttcattgacttaggagcctgctctgtcacttctcccaagatgatttatgacctgttcagaaagcgcaaagtcatctcctttggaggctgcatcgctcaaatcttcttcatccacgtcattggtggtgtggagatggtgctgctcatagccatggcctttgacagatatgtggccctatgtaagcccctccactatctgaccattatgagcccaagaatgtgcctttcatttctggctgttgcctggacccttggtgtcagtcactccctgttccaactggcatttcttgttaatttagccttctgtggccctaatgtgttggacagcttctactgtgaccttcctcggcttctcagactagcctgtaccgacacctacagattgcagttcatggtcactgttaacagtgggtttatctgtgtgggtactttcttcatacttctaatctcctacgtcttcatcctgtttactgtttggaaacattcctcaggtggttcatccaaggccctttccactctttcagctcacagcacagtggtccttttgttctttggtccacccatgtttgtgtatacacggccacaccctaattcacagatggacaagtttctggctatttttgatgcagttctcactccttttctgaatccagttgtctatacattcaggaataaggagatgaaggcagcaataaagagagtatgcaaacagctagtgatttacaagaagatctcataa

SEQ ID NO: 48437 - DNA, 615 bp, Homo Sapiens
atgccggagcgagatagtgagccgttctccaaccctttggcccctgatggccacgatgtggatgatcctcactccttccaccaatcaaaactcaccaatgaagacttcaggaaacttctcatgacccccagggctgcacctacctctgcaccaccttctaagtcacgtcaccatgagatgccaagggagtacaatgaggatgaagacccagctgcacgaaggaggaaaaagaaaagttattatgctaagctacgccaacaagaaattgagagagagagagagctagcagagaagtaccggggtcgtgccaaggaacggagagatggagtgaacaaagattatgaagaaaccgagcttatcaacaccacagctaactacagggctgttggccccactactaaggcggacaaatcagctgcagagaagagaagacagttgatccaggagtccaaattcttgggtggtgacatggaacacacccatttggtgaaaggcttggattttgctctgcttcaaaaggtacgagctgagattgccagcaaagagaaagaggaagaggaactgatggaaaagccccagaaagaaaccaagaaagatgaggatcctgaaaataaa

SEQ ID NO: 48438 - DNA, 150 bp, Homo Sapiens
gggctgcacgttacagatgagggagcaacacttgatggccttctcgtcccgaggcaccagccagcccgaccccgcaactgccgcggcgggcgggcgcggaactgcggggcagaagccgaagagtccaacctgctcaaaaaaaaaaaaaaa

SEQ ID NO: 48439 - DNA, 600 bp, Homo Sapiens
ttctgtggtggctccctcatcaataacaaatgggaggtgtccacggctcactgctataagtcccgaatccatgtgcatcttggagaatacaacattaaggtctatgaaggcaatgaacaattcataaatgcagccaagattatttgccaccccaagtataactcagccaccattgataatgacatcatgctgattaagctgagctcagtcgccaccatcaactctcaagtggccaccatctctctgccaagatcctgtgcagcggctggtactcagtgcctcatctctggctgggacaacaccctgagcagtggctttagaagagaaagtgcttcatgctggatcagcagtgtgggacaatggctccagcacaatggaagaacatcttacggcccattctcccatctgggcataaataagatctctgaatatcccttcctttttgcccagggtgactctggtgttcctgtggtctgcaacggagaactccagggcattgtctcctggggctatggttgtcctcagaagaacaaacctggagtctacactaaagtttgcaactacgtgaaatggattcagcagaccattgctgccaactaa

SEQ ID NO: 48440 - DNA, 619 bp, Homo Sapiens
ccagggccgcactccggagactcgcggttgctacgcgcaccatggctggagcgcccacggtctcgcttcctgaactccgttcactcctagcctccggacgggcccggctcttcgacgtgcgctctcgcgaggaggcggcagctgggaccatcccaggggcgctcaacatcccggtgtccgagttggagagtgctctgcagatggagccagctgccttccaggctttatattctgctgagaagccaaagctggaagatgagcatctcgttttcttctgtcagatgggcaagcggggcctccaggccacgcagctggcccggagtcttggatacactgggtacggggaggtgtggctgctagctgggaggtgatggggactgcctgtcattcctgtcagtctctcacgcttctttgtctccacagggctcgcaactacgctggagcctatagagaatggttggagaaagagagttaggcaggaggcagcttactgattgccaccccctggccccttaatggccaccttaactaagggtgtgaacgggctgacttggtgaattgggcaactccttatagtgttgtgcacacaaaagcatcaaataaagaacatttaatcaaa

SEQ ID NO: 48441 - DNA, 1032 bp, Homo Sapiens
atggaccccgagcactgcgcgcctttccgcgtggggcctgcacccggcccctatgtggcctcgggggacgagcctccgggcccgcagggaacccccgccgctgcgcctcacctgcaccccgcgccgccccgcggcccgcggctgacccgctttccggcctgcgggcccctggagccctacctcccagagccggccaagccgcccgccaagtacctgcaggacctcgggcccggcccggccctcaacggcggccacttctacgagggccccgcggaagctgaggagaagacctccaaagctgccagcttcccccagctgcccttggactgccgagggggccccagagacgggccctctaacttgcaaggctccccaggcccctgcctggccagcctgcatcttcctctttccccgggactccctgactccatggagttggccaagaacaagagcaagaagcgtcgtaaccgcacgaccttcagcacattccagctggaggagctggagaaggtcttccagaaaacccactatcctgatgtgtatgcccgggagcagctggccctgcgcacagacctgactgaggcccgggtacaggtctggttccagaaccgcagagccaagtggcggaagcgcgagcgttatgggaagatccaggaggggcggaaccccttcacggctgcctatgacatctctgtgctgccccgtactgacagccaccctcagctgcagaactccctgtgggccagtccaggatctgggagccctggaggcccctgccttgtgtctccagagggcatcccctccccatgcatgtctccatattcccacccccatgggagtgtggctggcttcatgggggtgccagccccttctgcggctcaccctggcatctactccatccatggctttccccccaccctggggggccacagctttgagccttcctcagatggtgactataagtctccaagcctcgtctcgctcagggtaaagcccaaggagccacccggccttctgaactggaccacgtga

SEQ ID NO: 48442 - DNA, 831 bp, Homo Sapiens
atgagagctccgcacctccacctctccgccgcctctggcgcccgggctctggcgaagctgctgccgctgctgatggcgcaactctgggccgcagaggcggcgctgctcccccaaaacgacacgcgcttggaccccgaagcctatggctccccgtgcgcgcgcggctcgcagccctggcaggtctcgctcttcaacggcctctcgttccactgcgcgggtgtcctggtggaccagagttgggtgctgacggccgcgcactgcggaaacaagccactgtgggctcgagtaggggatgaccacctgctgcttcttcagggagagcagctccgccggaccactcgctctgttgtccatcccaagtaccaccagggctcaggccccatcctgccaaggcgaacggatgagcacgatctcatgttgctgaagctggccaggcccgtagtgctggggccccgcgtccgggccctgcagcttccctaccgctgtgctcagcccggagaccagtgccaggttgctggctggggcaccacggccgcccggagagtgaagtacaacaagggcctgacctgctccagcatcactatcctgagccctaaagagtgtgaggtcttctaccctggcgtggtcaccaacaacatgatatgtgctggactggaccggggccaggacccttgccagagtgactctggaggccccctggtctgtgacgagaccctccaaggcatcctctcgtggggtgtttacccctgtggctctgcccagcatccagctgtctacacccagatctgcaaatacatgtcctggatcaataaagtcatacgctccaactga

SEQ ID NO: 48443 - DNA, 2074 bp, Homo Sapiens
agtgctccctccagcctccgcgcatttcagctggcgctgcagctgctgcacagagacccacagaggccaccctcggaaccagcgcccaatgagagggcgggacctgtgttcctccacacaaagccaggcgctgggatctttgagaaccaccaccccagcctttacccttaacattccatccgaggcaaaccacactgagcagccgcctgcaggcctgggagcaaggctacaggaagcaggtgtttccatccctcccaggcgaggccgcccaacaccaacactggagaagaagaaaaaacctcatttgatggcggaagatgaaccttcaggggccctcttgaagccgctggtttttcgcgttgacgagaccaccccggctgtggtgcaaagcgtcctcctggagagggggtggaataagtttgataagcaggagcagaacgcggaggactggaacctgtactggaggacatcctctttccgaatgaccgaacacaacagtgttaaaccgtggcagcagctaaaccaccaccctggaaccaccaagcttaccaggaaagactgtttggccaaacacctgaagcacatgaggaggatgtatggcacttccctgtaccagttcatccccctgacgttcgtcatgcccaatgactataccaagttcgtggctgaatactttcaggagaggcagatgctgggcaccaagcatagctattggatttgcaagcctgctgagttatctcgtgggagggggatactaattttcagtgactttaaagacttcatctttgatgatatgtacatagtgcagaaatatatctccaatcctttacttattggcagatataaatgtgatctccgcatctatgtttgtgttactggctttaagcctttgaccatttatgtttatcaggaagggttggttcggtttgccacggaaaagtttgacctcagtaatttgcaaaacaattatgcccatttgaccaacagcagcatcaataaatccggggcctcttatgagaagatcaaagaagtgattggtcatggttgtaaatggacgctcagcagatttttttcctaccttcgtagctgggatgtggacgatctgcttttgtggaagaaaatccaccgcatggttattctcaccattctcgccattgcaccatctgtcccctttgctgccaattgctttgagctctttgggtttgatattttgattgatgacaacttgaaaccatggcttttagaggtcaactacagcccagccttgaccttggattgttcaacagatgtgttggtgaagagaaaacttgtccatgatattattgacctgatttacttaaatggtctaagaaatgaggggagagaagccagtaatgccacacatggaaattccaacatcgacgctgcaaaaagtgacagaggtgggcttgatgctcctgactgtcttccttatgattctctttcgttcacaagcagaatgtacaacgaggatgactctgtggtggagaaagctgtgagtgtgcgtcctgaagctgcacctgcctcccagctggaaggagagatgagtgggcaggattttcatctgtcaacaagggagatgccacaaagcaagcccaagttacggagcaggcacacgcctcacaagacactcatgccctacgcgtccctcttccagtcgcactcctgcaagaccaagacctccccgtgtgtcctgtcagaccgtggcaaagctccagatccccaagcaggcaactttgttcttgtttttcctttcaatgaagcaactctcggagcttccaggaatggattaaatgtcaaaagaataatccaagagctccagaaactaatgaataagcaacattcctaagtggtaaaaaatcaaatcaagaaaaagtgacatggatttttaaaaaccaaggatcctgtcctagagaaagcaatagttcaagtccctacctgtgccaccagcatgttaactatgacattgggactgaagatgtggccatatgtataaatataacagctctgacaaagcacaatatgttcaagtggtgattaaactacattacatccc

SEQ ID NO: 48444 - DNA, 1897 bp, Homo Sapiens
atacagctgtcatggcgtccaaggcgctggctgcggagaagtggccgcggtctccatagagctgggggcgggcggcccggtatggagagcagccccgagagcctgcagccgctagaacacggggtggcggccgggccagcgtcagggacaggttcttcgcaggaagggctacaggagaccaggctcgccgctggtgatggtcctggggtatgggcggcggagaccagcggcgggaatgggctgggggcggcggccgccaggaggagcctcccggactcggcttctcccgcgggctctcctgaggttcccggaccctgcagctcctccgcgggtttggacttgaaggacagtggtttggagagtcctgctgccgccgaggcgcctctgagagggcagtacaaggtgaccgcctccccggagacagccgtggccggagtgggtcatgagttgggtaccgccggagacgcgggagcccgcccggatctcgccggcacctgccaagcagaactgaccgccgccggctccgaagagcccagcagcgccggcggcctcagcagcagttgcagcgacccgagccctcctggggaatctccgagcctggactctctggagtcgttctctaacctgcattcttttcccagtagctgcgagttcaatagtgaggagggagcggagaacagggtccctgaggaggaggagggcgcggcggtgttgcccggggctgttcctctgtgcaaggaggaggagggggaggagaccgctcaggtgctggcggcctccaaggaacgcttcccgggacaatctgtgtatcacatcaagtggatccagtggaaggaagagaacacacccatcatcacccagaatgagaacggaccctgccccttgctggccatcctcaatgttttgctcctggcctggaaggtgaaacttccaccgatgatggaaatcataactgctgagcagctgatggaatatttaggagattacatgcttgatgcaaagccaaaagaaatttcagaaattcaacgtttaaattatgaacagaatatgagtgatgccatggcaattttgcacaaactacagacaggcctggatgtaaatgtaagattcactggtgttcgagtgtttgaatatacaccagaatgcatagtatttgatcttcttgatattcctttgtaccatgggtggttagtagaccctcagattgatgacattgtaaaagctgttggtaactgcagctacaaccaactagtggagaagatcatctcttgtaaacagtcagacaatagtgagctggttagtgaaggctttgtagctgagcagtttctaaataacacagccactcaactgacataccatggattatgtgaactaacttcaacggttcaggaaggagaactttgtgtgttctttcggaataatcattttagcaccatgaccaaatacaagggtcaactgtatttgttggtaacggaccaggggtttcttactgaagagaaagttgtttgggaaagcctacacaacgtagatggtgatggaaatttctgtgactcagaatttcatcttcgacctccttcagatcctgaaactgtatacaaaggacaacaagatcagatagatcaggattatcttatggcattatctctacaacaagaacagcagagccaagagatcaattgggaacaaatcccggaaggaatcagtgatttggaactagcaaagaaactccaagaggaagaggacagacgggcttctcaatactatcaggaacaggaacaagcagcagctgctgctgctgctgcttctacacaggctcagcagggccagccagcacaagcctctccatcaagtggaagacaatctgggaatagtgaacgtaaacggaaggaaccacgag

SEQ ID NO: 48445 - DNA, 270 bp, Homo Sapiens
atgaagttgttcggcttcaggagccacaggggccagacggtcctgggcaccatagaccacctgtacacgggttccgggtaccgaatccggtactcggaactgcagaagatccacaaggcagctgtcaagggcgacgccgcggagatggagcgctgtctggcgcgcaggagcggagacctggacgccctggacaagcagcacagcagtgtgtccccaagaaagtgtcagagcctttacgtggaccttcccatggaaaaggaaacagaatag

SEQ ID NO: 48446 - DNA, 1885 bp, Homo Sapiens
ggaagaacccgcagcagctcccaggatgaactggttgcagtggctgctgctgctgcgggggcgctgagaggacacgagctctatgcctttccggctgctcatcccgctcggcctcctgtgcgcgctgctgcctcagcaccatggtgcgccaggtcccgacggctccgcgccagatcccgcccactacagggagcgagtcaaggccatgttctaccacgcctacgacagctacctggagaatgcctttcccttcgatgagctgcgacctctcacctgtgacgggcacgacacctggggcagtttttctctgactctaattgatgcactggacaccttgctgattttggggaatgtctcagaattccaaagagtggttgaagtgctccaggacagcgtggactttgatattgatgtgaacgcctctgtgtttgaaacaaacattcgagtggtaggaggactcctgtctgctcatctgctctccaagaaggctggggtggaagtagaggctggatggccctgttccgggcctctcctgagaatggctgaggaggcggcccgaaaactcctcccagcctttcagacccccactggcatgccatatggaacagtgaacttacttcatggcgtgaacccaggagagacccctgtcacctgtacggcagggattgggaccttcattgttgaatttgccaccctgagcagcctcactggtgacccggtgttcgaagatgtggccagagtggctttgatgcgcctctgggagagccggtcagatatcgggctggtcggcaaccacattgatgtgctcactggcaagtgggtggcccaggacgcaggcatcggggctggcgtggactcctactttgagtacttggtgaaaggagccatcctgcttcaggataagaagctcatggccatgttcctagagtataacaaagccatccggaactacacccgcttcgatgactggtacctgtgggttcagatgtacaaggggactgtgtccatgccagtcttccagtccttggaggcctactggcctggtcttcagagcctcattggagacattgacaatgccatgaggaccttcctcaactactacactgtatggaagcagtttggggggctcccggaattctacaacattcctcagggatacacagtggagaagcgagagggctacccacttcggccagaacttattgaaagcgcaatgtacctctaccgtgccacgggggatcccaccctcctagaactcggaagagatgctgtggaatccattgaaaaaatcagcaaggtggagtgcggatttgcaacaatcaaagatctgcgagaccacaagctggacaaccgcatggagtcgttcttcctggccgagactgtgaaatacctctacctcctgtttgacccaaccaacttcatccacaacaatgggtccaccttcgacgcggtgatcaccccctatggggagtgcatcctgggggctggggggtacatcttcaacacagaagctcaccccatcgaccctgccgccctgcactgctgccagaggctgaaggaagagcagtgggaggtggaggacttgatgagggaattctactctctcaaacggagcaggtcgaaatttcagaaaaacactgttagttcggggccatgggaacctccagcaaggccaggaacactcttctcaccagaaaaccatgaccaggcaagggagaggaagcctgccaaacagaaggtcccacttctcagctgccccagtcagcccttcacctccaagttggcattactgggacaggttttcctagactcctcataaccactggataatttttttatttttatttttttgaggctaaactataataaattgcttttggctatc

SEQ ID NO: 48447 - DNA, 399 bp, Homo Sapiens
atggcggccactggggaaacaggacaaagagcagaccaccgaggccacggagaccctcagcactccgtgagcgggccccgcgtgcagggggattgctggccagacctgacagcctcacacgggacaggcaccatctatgttcacctgcacagcacgcacacacaggttctatttacaaagcgactaagaacaacacagtgcaatcaggaacacatcacaactgtcaggaatggttcacagtcagtcatgagagtgtgcgtttgccagccaggagctttcagtgcacacgttcgggtcacaaatgtgactttaggcttagatcgaaaggcaccctcgtcttcaagcccacaacgctgccatcggcatgtcactttcgtcaagaggaatatgtgcaattaa

SEQ ID NO: 48448 - DNA, 1512 bp, Homo Sapiens
atggccggcctgtcggacctggaactgcggcgggagctgcaggccctgggcttccagccaggacccatcaccgacaccacccgggatgtctaccgcaacaagctgcgccgcctgcggggcgaggcccggctgcgcgacgaggagcggctgcgggaggaggcccggccgcggggcgaggagcggttacgggaagaggcccggttacgcgaggatgcgccgctgcgcgcccggcccgccgcggcctctccgcgggcggagccctggctctcccagccggcctcgggctcggcctacgcgacccctggggcctacggtgatatccggccctccgcggcttcctgggtagggagccgcggcctcgcctatcctgcccgcccggcgcaactcaggcgccgcgcctcggtccggggcagctccgaggaggacgaggacgcccggacgcccgacagggccacgcagggcccgggtctcgcggcccgccgctggtgggcagcgtctcccgccccggcgcggctgccttcctccctcctcggtcccgacccgcgcccgggcctgcgggcgactcgagcgggccctgctggcgcggcgagggcccggcctgaggtggggcgccggctggagcgctggctctctcggcttctgctctgggccagcctagggctactgctcgtcttcctgggcatcctttgggtgaagatgggcaagccctcagcgccgcaggaggcggaggacaacatgaagttattgccagtggactgtgagagaaaaacagatgagttctgtcaggccaagcagaaggcagccttgctggagctgctgcatgaactctacaatttcctggccatccaagctggtaattttgagtgtggaaatccagagaatctaaaaagcaaatgcattcctgttatggaagcccaagaatatatagccaatgtgaccagcagctcctccgccaagtttgaagccgcactgacctggatactgagcagtaacaaggacgtgggcatctggttgaaaggagaagaccagtctgaattggtgacgactgtggacaaggtggtctgcctggaatctgcccacccccgcatgggtgttggctgccgcctgagccgggccttgctcactgctgtcaccaacgtgctcatcttcttctggtgcttggcttttttgtgggggctcctaattctcctaaaatatcggtggcgaaagttagaagaggaggaacaagccatgtatgagatggtgaagaagattatagacgtggtccaggaccattacgtggactgggagcaggacatggagcgctatccatatgtaggcatcctgcacgtgcgcgacagcttgatccctccacagagccggaggcgcatgaagcgtgtctgggaccgagctgtggagttcctggcctccaacgaatcccggatccagacggagtcccaccgcgttgcaggagaggacatgctggtgtggagatggactaagccctcttccttctctgactcagagcgataa

SEQ ID NO: 48449 - DNA, 2530 bp, Homo Sapiens
tgttccaggctcagcagggagctgctggatgagaaagggcctgaagtcttgcaggactcactggatagatgttattcaactccttcaggttatcttgaactgactgactcatgccagccctacagaagtgccttttacatattggagcaacagcgtgttggctgggctcttgacatggatgaaattgaaaagtaccaagaagtggaagaagaccaagacccatcatgccccagtgtgtcacccggccaattcgctgagctcactttctcctctgtctctctctccctctccctctccctgtctttctctttcattcttttctacctggccctggtctatcccaacataaaggcaataattcattacctcattaatggatctgtcctttttctgtttaaacagttccttatgttagccatgaaatgtagctggggctgtgtggtttctgattccccctggctttttactttttcctacttttccaggctcagcagggagctgctggaggcagtagagcctgaagtcttgcaggactcactggatagatgttattcaactccttccagttgtcttgaacagcctgactcctgcctgccctatggaagttccttttatgcattggaggaaaaacatgttggcttttctcttgacgtgggagaaattgaaaagaaggggaaggggaagaaaagaaggggaagaagatcaacgaagaaaagaaggagaaggggaagaaaagaaggggaagaagatcaaaacccaccatgccccaggctcagcggcatgctgatggaagtggaagagcctgaagtcttgcaggactcactggatagatgttattcgactccgtcaatgtactttgaactacctgactcattccagcactacagaagtgtgttttactcatttgaggaacagcacatcagcttcgcccttgacgtggacaataggtttcttactttgatgggaacaagtctccacctggtcttccagatgggagtcatattcccacagtaagcagcccttactaagccgagagatgtcattcctgcaggcaggacctataggcacgtgaagatttgaatgaaactatagttccatttggaagcccagacataggatgggtcagtgggcatggctctattcctattctcagaccatgccagtggcaccctgtgctcagtctgaagacaatggacccaagttaggtgtgacacgttcacataactgtgcagcacatgccgggagtgatcagtcagacattttaatttgaaccacttatctctgggtagctacaaagttcctcagggatttcattttgcagtcatgtctctgagcttctatacctgctcaaggtcagtgtcatctttgtgtttagctcatccaaaggtgttaccctggtttcaatgaacctaacctcattctttgtatcttcagtgttgaattgttttagctgatccatctttaacacaggagggatccttggctgaggattgtatttcagaaccaccaactgctcttgacaattgttaacccgctaggctcctttggttagagaagccacagtccttcagcctccaattggtgtcagtacttaggaagaccacagctagatggacaaacagcattgggaggccttagccctgctcctctcgattccatcctgtagagaacaggagtcaggagccgctggcaggagacagcatgtcacccaggactctgccggtgcagaatatgaacaacgccatgttcttgcagaaaacgcttagcctgagtttcataggaggtaattaccagacaactgcagaatgtagaacactgagcaggacaactgacctgtctccttcacatagtccatatcaccacaaatcacacaacaaaaaggagaagagatattttgggttcaaaaaaagtaaaaagataatatagctgcatttctttagttattttgaaccccaaatatttcctcatctttttgttgttgtcattgatggtggtgacatggacttgtttatagaggacaggtcagctctctggctcaatgatctacattctgaagttgtctgaaaatgtcttcatgattaaattcagcctaaacgttttgccgggaacactgcagagacaatgctgtgagtttccaaccttagcccatctgcgggcagagaaggtctagtttgtccatcagcattatcatgatatcaggactggttacttggttaaggaggggtctaggagatctgtcccttttagagacaccttacttataatgaagtatttgggagggtggttttcaaaattagaaatgtcctgtattccaatgatcatcctgtaaacattttatcatttattaatcatccctgcctgtgtctattattatattcatatctctacgctggaaactttctgcctcaatgtttactgtgcctttgtttttgctagtgtgtgttgttgaaaaaaaaaacattctctgcctgagttttaatttttgtccaaagttattttaatctatacaattaaaagcttttgcctatca

SEQ ID NO: 48450 - DNA, 2206 bp, Homo Sapiens
ggggccagggtggcagcccccagggagccggcaggatggcagagggcaaggcgggcagcacagccggcctcttcaccaagcaggtgcagaagttcagcagggcccaggagaaggtgctgcagaaatcggggaaaactgtagaaaccaaagatgaacaatttgaacaaagtgctaacaacttctaccaacaacaggcagaaggccacaactatacaaggacctgaagaacttccttagtgcagtcaaagtgatgcatgaaagctcaaaaagagtgtaagaaaccctgcaggagatctacagcagtgagtgggatggtcatgaggagctgaaggccatcatagagaataatgatctcctttgggaagactagaggagaaacttgctgatcgggctgtgaggaccatggaaaagtacattacccagttcagcaaaagtaaggagagaattgccaagcggggtggaaactcgtggactgtgacagtgcccgacatcacctggaggcagtgcagaatgccaagaaagatgaggccaagactgccaaggcagaggaatagttcaacaaagcccagactgtgtgtgaagatctgaaccaacatatgcaaatcaacaaactactagaggagttgtctattctttataatagtcatactggctctatgtgaccatcttccaaaacatttccaacttgagggatgtcttctacagggaaatgagcaaactgaaccacaatctctccgaggtgatgagcaaactggagaagcaacattccagtaaagtctttgtggtgaagagactatcaagcagcagcaggcgctctttagtcatttctcccccagttcgaacatctacagtctccagtccacttacctcacctactagtccctctacactttcctcgaagagtaagagtgaatctgtctcagcaactgaagatctggcacctgatgcagcccagggggaagacaattctgagatcaaggagctcttagaagatgaggaaatagggaaggaaggatctgaagcaagctcctctgaggaagaagagcctctactaacctgcaacggcccctcccaggcccagccctctcctatcattgagagtgccaggtcccaggaagaagttccccccagctcccctgctctatcaccaggtggagccctaagcccttcaggacaccctttatcatctgccgcagaagtagtcctccgaacccgcaccgcaggtgacaaatctgaacaatcaaagaagagagcctctatccagaggacctcagcaccccctagtaggcctcctccacccagagccactgcaagccccaggccctcctcagggaacataccctccagccctccagcctctggagggggttcacccaccagccctagggcctccttggggactgggactccaagtcctaggacctccctagaggtctctcctaatccagaaccaccagagaagccagtaagaactcctgaggccaaagaaaatgaaaacatccacaatcagaacctcgaagaactttgtacttcccccaccttaatgacatctcacattgcttcagagcctggagaggcaaagaagatggaagacaaggaaaatgataacaagcttgtctcagctgactcctcggagggccaagaccagcttaaagtctccacagtaccagacaagagcaacctcacagcacctgaacctcaagaagaggtatctacaagtgaaaatgcacaactctgaagagaaactgccaagattccccaagccccacacctccccagagaagctcttcaaccagagggtataggtcagagggatataatagacagcatccatccctgggttctcagtaagaatgatggtgctgtctaaagacctggcattaatggaggtggaggagcagccttaagggagggatggagggaggcaggctggggaggagaagagaacattagactcagggaatatttaattcaggttttagcattattagaataagactttatacattaaggtggagctataatcactataaaaagcaaaagtatctatagacacagacacttgtctacacagagacataaccacacatactcagaggacagtgaataaatctgtctttgacttatgacccattttgcaagacttaaagccagaagaacacattttcagattgttaaataaagtctgattctgacaaaaaaaaaa

SEQ ID NO: 48451 - DNA, 219 bp, Homo Sapiens
atggggtctcattctgacacccagactggagtgcagtggcatgatcttggctcactgcaacctttacagcctgggttcaagcgattctcctgcctcagcctcccgagtagaggattacaagtgccctgccactacacctggctaatttttgtatttatagtagagacagggttttgccatgttggccaggctgttctcaaactcctaacctcaggtgat

SEQ ID NO: 48452 - DNA, 822 bp, Homo Sapiens
atggcggaggcaggaaaagtgcccttgagcctcgggcttaccggaggagaagcggcagagtggcctctgcagcggtacgcccgctgcataccctcaaacaccagagacccacctgggccatgcctggaagctgggacagccccctgccccacatggaaggtttttgattccaatgaagaatctggatatcttgttctcaccatagttatatcaggtcatttcttcattttccaaggacagacactactggaagggttttcactcattggtagcaaggactggttgaagattgtaagacgcgtggattgtctgttgtttggaacaacgataaaggcaagatttaagctaatgatcacactcttctcatcttctattcgcctgtttcgagtacagttcagtggagagtcaaaggagcaggcgctggaacactgctgcagttgtgttcagaagctggcacaatacataaccgtgcaggtgcctgatggaaacatccaggagcttcagctgattcctggcccacccagggcaactgaaagtcaagggaaggattctgcaaagagtgtcccacggcagcctggagtaaaacaacagcaagtgtgtgtaacagcgggcacaggcgctccagacggaaggacctcactgacgcagttagctcagactcttctggcatcggaggagctgccccatgtctatgaacaatctgcatggggtgcagaagagttaggccccttcctacgtttgtgccttatggatcagaatttcccagcatttgtggaagaggtagaaaaggaactgaaaaagctggcgggtttgagaaattaa

SEQ ID NO: 48453 - DNA, 369 bp, Homo Sapiens
cctaccaagaattatgaagaaatggaaaatctaaacagaccagtaataagtaagagattgaatataatcaaaaaccacccaagaaagaaaagttcagggccagagtgcactggtgaattctaccaaacatttcaagatgaattaataccagtcattttaaataattccaaaaaatttagggagggaacactttcaattttatttaatgaggtcagaattatcctaataaaagatactacaagtaataaaaacaataggtcaatatttctgatgaacatagatatgaaaatcctcaacaaaggaaaaaataaaaagcacattaaaaggatcatagaccatgatcaagtgggatttatctcagagatgcaa

SEQ ID NO: 48454 - DNA, 660 bp, Homo Sapiens
gagacaaagcatggaggacacaagaatgggaggaaaggcggactctcaggaacttcattcttcacgtggtttatggtgattgcattgctgggcgtctggacatctgtagctgtcgtttggtttgatcttgttgactatgaggaagttctagccaaagcaaaggacttccgttataacttatcagaggtgcttcaaggaaaactaggaatctatgatgctgatggtgatggagattttgatgtggatgatgccaaagttttattaggacccagtggggtagccaagagaaaaactaaggctaaagttaaagaactcactaaagaagagctcaagaaggagaaagagaaacctgagtcaaggaaggaaagtaagaatgaagagagaaaaaaggggaagaaagaggatgtccgaaaggataagaaaattgctgatgcagacctatccaggaaggagtctcctaagggtaaaaaggacagagaaaaagagaaagtggacctagaaaaaagtgctaaaaccaaggaaaataggaaaaaatcaacaaatatgaaggatgtttctagtaaaatggcatcccgagacaaagatgacagaaaggaaagtagaagttctaccagatatgcacacttaacaaagggaaatacccagaaaagaaacggctaa

SEQ ID NO: 48455 - DNA, 408 bp, Homo Sapiens
atgaagttcaatccctttgtgacttccaaccaaatcaaaaatagcaaaaggcatttcaatgcaccttcccacattcacaggaagattatgtcttcccctgtttccaaagagctgagacagaagtacaatgtgcaatccatgcccatccgaaaggatgatgaagttcaggttgtacgagggcactataaaggtcagcaaattggtaaagtagtccaggtttacaggaagaaatatgtcatctacattgaatgggtgcagcgggaaaagactaatggcacaactgtccacacaggcattcaccccagaaaggtggctatcactaggctaaaactggacaaagacagcaaaaagatccttgaatggaaagccaaatctcgccaagtaggaaaggaaaagggcaaatactag

SEQ ID NO: 48456 - DNA, 1817 bp, Homo Sapiens
ctgttggccacagtgcttgcacatggccttgccatgtggcatgggcacagcatggtacctggattctacagagaatgccctaacagtaaatgttccaagagctcaaaaccacaaagcttctcataactcaatgtggaaattaggcagtcacttctactgcattctattggttacaaaggacccacctgggttcacaatggtatgagtactgggaggcatggttcattgaggaccatctttgtcgacttgctatcacaggcacaaaatcgtttcaaaaacacatatttttaaaattccctctcctcttggctcataggtcaatgggaaagctgtctgagacaatatgaaaatcaatgatgccactctagcattagctgaagatccccttgatttcatccagcagccaagacactaagtgacccaaaggaagaaaagggtgatcagcgtggctgtgtggtcagtaagtaaatgtgcaacagctggagtaaattagaactaatttagtgcataacttcagcaggaataaattttgttaatcttcaaaaagtcaaaacaaggattgtaactttcacagtatctgaatcacccaaattttactacaagactcttgtcctcattgttgcacttaccagttccgtactgataataaagaaaaattactattgaccttttcctaacaaagaacaatttttaaaattttgtttttacaataggaccctatggagctgttgttttaatattatgtaaattaagtaattttatctactctaaacaaattgctttatcagttgtagtcgaatctgactactcttatgcttattttattattaatccaagtaaatattctctattgaacatagattagcagtttacaaattagataaaaacagaaaacaaatcacttcaacagtattaactagaaatatgctagctactccttatttcagaataaggtgtcacaattcttccttttaaaatgttgtattgtatcatacttaaaaatatataaataattcctgaataaaagcatccaatatttatcattttattagtattagcctttgggaaaaaatttgatagcatgattttataaagctcttgcatttgctttaaatttagctaactattttgaccacaaggtggagctgtgatgtcacaatttggcaagatttgtaagatacaaaaactatgtaaatacagacgaaaataatttaataaaataggataatctcatcttgcaaatatgcactatttaaaattaatcaattctccaaacattaattatcagaagaaaactatcatttaatttgtccagttctcacttagcagttattgagctttatcatatataaattgtcttcagtagatgcagaattattctgtcatttcacatcacgatcccagatttagtgactttaaaccagtgttaaaatgtctttcaaaattattttgtaattaatcacagaataattcattaaccattacaaaatgtaatggttacattacatccttattttgttatccaatattgactagaggatcatccattatatcttctaaaataattctttcagttgattatttgtgttttgtattgttaaacaggcagaaacttctaattttcaaaagagagtattcagattttgagtcaaccaaatttcagtgaagatagactagcatgctaaactcatcgtctcttgaattattaaataaacaaacattaccaccacttcaataatatctgtcaggaatgaaaccacttttccaaatgaatgtttcctgatctattttaatatattaagaataaaacaaaaata

SEQ ID NO: 48457 - DNA, 611 bp, Homo Sapiens
attcctgaacaacgttggtttcttttttccactgataatgatgctgacgtggatggtgtctgtggccagcatggtcagaaagttggtgtatgagcaggagatacagatagaagagtatatgcggatgatgggagtgcatccagtgatccatttcctggcctggttcctggagaacatggctgtgttgaccataagcagtgctactctggccatcgttctgaaaacaagtggcatctttgcacacagcaatacctttattgttttcctctttctcttggattttgggatgtcagtcgtcatgctgagctacctcttgagtgcatttttcagccaagctaatacagcggccctttgtaccagcctggtgtacatgatcagctttctgccctacatagttctattggttctacataaccaattaagttttgttaatcagacatttctggtaattctaactctgacctttttcttcctgctagggattcaatggaataatatgtaccaggctctggaacaagggggcatgacatttggctgggtttgctggatgattctttttgattcaagcctttattttttgtgtggatggtacttgagcaacttgattcctg

SEQ ID NO: 48458 - DNA, 921 bp, Homo Sapiens
atgccactaactaatgaaagccaccctgaagaatttattctgctaggctttgcagaccgcccttggctagagcttcctctgttcactagtcttcttataatgtaccctatagccgtgatgggaaacatcacaatcattctcatgtccaggttagactctcgtcttcatagccccatgtatttcttcctcaccaacctctcctttttggacatgtgttataccacaagcattgtccctcagatgctgtttaacctgggaagctctaagaagaccatcagctatatggggtgtgcggttcagctttatttctttcacataatggggggaacagaatgtttgcttttggctattatgtcctttgatcgctatgtggccatctgcagacctcttcactacaccctcatcatgaatcagcgcgtctgtatccttagtttccaccgtgtggctaattggaataatctatgctgtctcagaggccactgccacattacaattgccactgtgctcaataaactggaccacttggtgtgtgagattcctgttctgataaagattgcctgtggtgaaaagggttctaacgagctcacactctctgtggtatgcatttttatgttagctgtcccactatgcttaattcttgcttcctatgctagtattggaactcaagcagtattaaaaatcaggtcagcagaaggacggcaaaaagcatttgggacatgtgggtcccacatgattgtggtgtccctcttttatggaacagccatttatatgtatcttcaaccaccttcatccacctctaaggactggggaaagatggtttccctcttctatggaatcatcacatccatgttgaactccctcatctacagccttagaaataaagatatgaaggaggccttcaagaggctgatgccaagaatc

SEQ ID NO: 48459 - DNA, 387 bp, Homo Sapiens
atggtgtccacgtgtgtacacctgcagagttgtaacatgcgggcatttctcccctcagcccgccattctggcttcttaacttgcaccctaacagctcgacagaaccttggcgtccacaaaaaggcaagtttgggtctgccttatgatttgggggacttgaggtgggacatggaagaacagggacccctcctggtttgtccacccagcccacacctccattcctcacccaacctaccacttcagagccgggaaaagacctcagagaacatccgctccgactctaccgaggctcagacaggacaacaagagtgtgctggacactgggaaatgtggtccaggagcagtcacagtccctatagacctcccacaaattaccgtaatgcaaag

SEQ ID NO: 48460 - DNA, 979 bp, Homo Sapiens
tggccgtcggggcggagggcggtggccggccgcggtccgggcgtcaggccgggcggcgggggcggcagggaggcggcgctctggggccgcaggcggacgtactctgtgagcggcgcccgggcgcctgggcaggcgcctcccgagtaccggcgcccattttgcccgcccgctaaggagacccgtgcgcggcctacacgcttgggggacagccctttaagacgacatctccgcgaacgccggcctcttgagccagggggacgctcttttgaaagtcagtcccaaaacagttaaggttttattttattttgttttatttccaagtcacagcccccgaatctcgtacaactctccctggaccacttccggttgccggcccgcgcctcataacttcggttcgagtgacctcggcccgggatgcccctcggctcaccccgggctcacgtcgcgatcctggcttgagtggcccagggtgggagacctggaagttttagcctagctgttctcaaggcggattaattagcccaagaaacattatattcatttttctggatatgccgcagaaggatccgtgccagaagcaagcctgtgagatacagaaatgtttacaagccaacagctacatggaatcaaagtgtcaggctgtcatccaagaactgcgtaagtgttgtgctcagtatcccaagggaagatctgtcgtctgttcaggatttgaaaaagaagaggaagaaaacctaacacggaagtctgcatcaaagtaaagttcttctgaagtgctgctccatgtttccaccaaatgaattttttttatcctcctgactcttcaggccaggtagcagcaaatagcaaatgaaaaagtcagctacaaaagttaatgaatatgccatctatgcagaacaggcagaaatataaacacattaaaagacaaatatgtagaatgtaatatactgagctgctaaaataaacctgtttaagagaaaaa

SEQ ID NO: 48461 - DNA, 741 bp, Homo Sapiens
atggctgagccgactagtgatttcgcgactcctatcgggtggcctgcatctcccgggctgactcccacgttagggcccctgaccgacactgccccgccgcgggacagctggatgttctgggcaattctgccgccaccgccaccaccgcttacgtcctcgcttcccgcagccgggtcaaagccttcctctgagtcgcagccccccatagaggcccagtctctccccagggctccgcccctctttgacgcccagcttcttcccggggcgcaaccccccttccacgcacagtccccccttgattctcagcctcaacccagcggccagccttggaatttccatgcttccacatcgtggtattggagacagtcttctgataggtttcctcggcatcagaagtccttcaacccttcagttaaaaattcttattatccacgaaagtatgatgcaaaattcacagacttcagcttacctcccagtagaaaacagaaaaaaaagaaaagaaaggaaccagtttttcactttttttgtgatacctgtgatcgtggttttaaaaatcgagaaaagtatgacaaacacatgtctgaacatacaaaatgccctgaagtagattgctcttttactgcacacaagaagattgtccagttccattggagaaatatgcatgctcctggcatgaagaagatcaagttagacactccagaggaaattgcacggtggaggggagaaagaaggaaaaactag

SEQ ID NO: 48462 - DNA, 327 bp, Homo Sapiens
caaacagctactcagctgcttaagctggcccacaagtacagaccagagacaaagcaaaagaataagcagaggctattgagggctgagaagaaagctgccagcaaaggggacatccccaataagagaccacctgtccttcaagcaggagttaagactgtcaccaacttggtggagaacaagaaagctcagctggtggtgattgcacatgacgtggatcccgttgagctggttgtcttcctgcctgtcctacattgtaaaatgggggtcccttactgcattatcaaggggaaggcaagactgggacatctagtccacaggaagacctga

SEQ ID NO: 48463 - DNA, 321 bp, Homo Sapiens
cagtgtgggggaacagtggaggagatggagggggtgatcctgagccccggcttcccaggcaactaccccagtaacatggactgctcctggaaaatagcactgcccgtgggctttggagctcacatccagttcctgaacttctccaccgagcccaaccacgactacatagaaatccggaatggcccctatgagaccagccgcatgatgggaagattcagtggaagcgagcttccaagctccctcctctccacgtcccacgagaccaccgtgtatttccacagcgaccactcccagaatcggccaggattcaagctggagtat

SEQ ID NO: 48464 - DNA, 1152 bp, Homo Sapiens
atgaatgctggcccatcttggaataaagtgcaacattcaaagaattcttcaggaaaaaggcagagtaaatcccaagtaccccacgcttcttcccagccgagaagcagcctcacagctgtcacccagcctactgaagaaaaacttaaagaaagcatttccccggaagcaagacgcaaaaggaatccactcggttccaggtgtcagggggcctcagggaataaactgtttcttgattttcagtcaatgaaaattattaaagagaatgctgatgaggacagtgcaagtgatctctctgattcggaaagaattcccattcctccttctcccctcacacctccagatctcaatcttcgagctgaagaaattgatccagtttactttgatcttcaccctggtcagggccatacaaaacctgaatactattatcctaatttccttccatcccctttcagctcctgggacctacgagatatggccctgcttctgaacgcagagaacaaaacggaagccgtgccccgagtgggaggacttcttgggaagtatatcgatagacttattcagcttgagtggctgcaagtccagactgtacagtgtgaaaaagcaaaggggggcaaagcaaggccccccactgcccctgggacctcaggggcactgaaaagccctgggagaagtaagctaattgctagtgctctgtccaagccactacctcaccaggaaggggcttcaaagtcaggcccttcccgaaagaaagcttttcaccatgaagaaatccacccatcacattatgcatttgagacttcccctagacccattgatgtgcttggtggtaccaggttttgttctcagaggcaaacccttgaaatgaggacagaagaaaagaaaaagaaatcaagtaagagtacgaagctgcagcgctgggatctgtccggcagtggaagcagctctaaggtggaaaccagcggtcacattcgagttcccaaacaggcagctgtgattctggactcagcagattcctgtaaggcctccaaaacacaagcacatgcacatcctaggaaaaagggaaaggcagagagctgtggtcatgccactgtatcgagtgagaaaaaactgaaaacaaacggagtaaagcaaaacacatataaactaaaataa

SEQ ID NO: 48465 - DNA, 1669 bp, Homo Sapiens
attgtcttgtctttccttctagaaccttctgataacttaagagagattctccaaaatgtggccagattgcagggagtatcaaatatgagaaagctaggccatctgaataactttactaagcttctttgtgatattggccacagtgaagaaaaactgggctttcactatgaggatatcataatttgtttgcggttagctttattaaatgaagcaaaagaagtgcgagcagcagggctacgagcgcttcgatatctcatccaagactccagtattctccagaaggtgctaaaattgaaagtggactatttaatagctaggtgcattgacatacaacagagcaacgaggtagagaggacacaagcacttcgattagtcagaaagatgattactgtgaatgcttccttgtttcctagttctgtgaccaactcattaattgcagttggaaatgatggacttcaagaaagagacagaatggtccgagcatgcattgccattatctgtgaactagcacttcagaatccagaggtggtggcccttcgaggtggactaaacaccatcttgaaaaatgtgatcgattgccaattaagtcgaataaatgaggccctaattactacaattttgcaccttcttaatcatccaaagactcgacagtatgtgcgagctgatgtagaattagaggtaggaactttaatattcttttctagttttaaaatattattataaatgtatacttttactttgaaatactaaattttatagatgcagcaccacattaattatcaagcctaaattagccgacactaatttattcccagctctgttttacagatcattcagtttggactgaattgaaaacattactcttaagaatatttcatcaatgtgtaaattttatttttgtattatctatgaaaagtttatgaaccaaattagagtacaaataaagttatgtaacaaatttacctatttaagattaccatttgtttttaaggcctttagtacattgtgtgtgaatagctcctgctaattatacaatatttatgaaacctaaaattatctgaagttggaagcactttgttagcaactaattatatctacttgaaagaaagcatgtatgtatattttgtaaatacctcttaaattttttactgattcaagtaaggtttattacagttagtcaaaagtaacagggctactgtataccttataagaaagtatgtcgtggaggttggaacagaattatgcactgtattatagtttcttcgtgtgcatgtattgcattgttgtcctttgaatatagtatttggagtcagcttaaatcaaggatttgtttgtatttaggtatgaaatcatgtgtgatataaaagattgattgtcccctaatttgtttttccaaatcattttttgaaacttaagtgttctgtttttatcaggactatttttaaaaatgcttcacattataaaattgacattagcctatattattaactaacaatgttagtataatagtcctaataagtgatttcaagtatattatttattggaatcctgtgggaataaactggcactgttgatattttataatatgtttagctttaattttttttcttatcaagtaagaaaactgtaattttaaaattggagagatgaataaaagataatatgtata

SEQ ID NO: 48466 - DNA, 1800 bp, Homo Sapiens
atggcttgttacctggtcatcagttcgagacatctcagcaatgggcactaccggggcattaaaggagtcttcaggggacccctgtgcaagaacggatctccctctccggattttgcagaaaagaagtccacagcaaaggccctggaagatgtaaaggcaaacttttactgtgaattatgtgacaagcagtatcacaaacaccaggagtttgacaatcatattaattcttatgaccatgctcataagcagagactgaaagaattaaagcaacgggaatttgctcgaaatgtagcttctaagtcatggaaagatgagaaaaaacaagaaaaagcacttaaacgacttcatcagctggctgagttaaggcagcaatctgaatgtgtttctggaaatggaccagcatacaaagcccccagggtagccatagaaaagcaactccagcaaggaattttccccattaagaatggcagaaaggtatcatgcatgaagagtgctcttctccttaaaggaaaaaatctccccagaatcatatccgataaacagcggtccaccatgccaaatcgacaccaattacaatcagacaggcgttgtttgtttggaaatcaggtactgcaaacatcttcagatctcagcaatgcaaatcacagaacaggagtatcatttactttttccaaaaaagtgcacctaaaattagaatcttcagcatcagttttcagtgagaacacagaagaaacccatgattgtaacaagtcacccatttataaaacaaaacaaactgcagataagtgcaagtgctgcaggtttgcaaataaagatacacaccttaccaaggaaaaagaggtaaatatctcaccaagccatctggaaagtgttttacacaataccatctccataaactctaaaattttgcaagacaaacacgactctattgatgagacactagaagattcaattggcattcatgcttcattctctaaatctaacattcatctttcagatgtagattttactcctaccagcagagaaaaagaaactagaaatacattgaagaacactttagaaaattgtgttaatcacccatgccaagcaaatgcttccttcagcccaccaaacatttacaaccatagtgatgccaggatatctgaatgcctggatgagttttcatcactggagccaagtgaacaaaagagtacagtgcatctgaatccaaattccagaatagagaacagagaaaaatctttagataaaacagaaagagttagcaaaaatgttcaaagacttgtaaaagaagcatgtacccataatgtggcatctaaaccactaccttttctccacgttcaaagcaaggatggccacaccactcttcaatggcctacggaacttctgctctttacaaaaacagaaccctgtatctcttatggctgcaacccactgtattttgattttaagctttctcggaacacaaaggaagaccacaatctagaggacttaaaaacagaattgggtaagaagcccttggaattgaagactaaaagagagagccaagtctcaggtttaactgaagaccaacaaaaattgatccaagaagattatcaatatccgaaaccaaagacgatgatagctaatccggattgggaaaaattccagaggaaatataatttggactacagtgattctgagccaaataagagtgaatatactttcagtgcaaatgatttggaaatgaaaaatcctaaagtgcctctttacctcaacacatctctaaaggattgtgctggaaagaataatagtagtgagaac

SEQ ID NO: 48467 - DNA, 351 bp, Homo Sapiens
atggacatgagggtcctcgctcagctcctggggctcctgctgctctgtttcccaggtgccagatgtgacatccagatgacccagtctccatcctcactgtctgcatctgtaggagacagagtcaccatcacttgtcgggcgagtcagggtattagcagctggttagcctggtatcagcagaaaccagagaaagcccctaagtccctgatctatgctgcatccagtttgcaaagtggggtcccatcaaggttcagcggcagtggatctgggacagatttcactctcaccatcagcagcctgcagcctgaagattttgcaacttattactgccaacagtataatagttaccct

SEQ ID NO: 48468 - DNA, 1778 bp, Homo Sapiens
caggtggaaatgaacaactgcccccaaagcctgcgccggaggctggagttgccattgctgcttgtgtggagatggagcagctgtatgacccacttgactcagacatgccagccatggacacagctggcctgttcaaagaaagtcatgaagatatgaagaagtcagatgaagaggaagagaaacagaagatggaagattctctgtgggcaggtgtggaggcgtgtcaaaaggtagacactggagctattgatatcaagacactagaaggtacagaggaatttgaagagaaagcatgtgaaaggacaggaaacagagtggtagaacttcttaataccataggaaaggaagaccataagaccttaaaaattaatgaagtggaaactagaaaagatctaagagcagggtataaggaaagtacaaacgccaatgaaaattattttgagaaaactgacctattagaaaaggacatggaaggaggagatatggcaaaagaacttagtgacagagaccaaggtctacatgatggaattcaaaaggtaatcaataattgtggaatgatagaaggctttggagccaaacctgccaatcacccagatatcttgaatccatctctccagacctactctgtatctaatattgaagatggcagccctgagggatgggatttgactagaaaagacataaagaaaaatgcaatagacactcccaaccatgatatgatattttacccagcacaagacagtacagatgctgaagaaattcagtgtgagactgtgttaaatgctcttgtaggtgacagggataaaaatcaggctgttttatcaataaaacttgaagtagaagctcagtctaggactgaccttaattattctctgggaagagatgcaaacagaagagatttatgttcatgtaaggcagaaagttcactaatagaagggtctgaaagaacagtaactgagaactgtagtcatactgttaacttgccaagaattgcagagatagactcttggggaacagatccaggtcaaatctggcagccaagcttggattcagcaatgaataatttggatataacaggattctctggtataccagatggccaagcaagtggatttgccagttgtctggattctattaaccactggcctatcagagatacagaaggcttagataatagctggacacattcagatgtagttgagcacaaggaagaactgaaggtggacttactagcaggtgattgtagggaacaagccattgctagctgctgggaacaaagccaggagatagcaagaccattgattttggggacctcctggaatgctagcactgagagttctgctagttcccgagaccaggacatcaacaactcagatttatctgaagatgaaattgctaaccagagatatggattgttgtaccaagaaatagaggctgacaaagacgaggcttctggtggttcatttaatggattcacacagccccaggatacttcattattcacaatgcagacagaccagagtatgatctgcaacttgatcatacctggagctgatgctgatgcagctgttggaaccttggtgtcagcagctgagggggccccaggagaggaagcagaggcggagaaggccactgtccctgccggggaaggagtaagtttagaggaggccaaaattggaactgaaaccactgagggtgcagagagtgcccaacctgaagcagaggagctcgaagcaacagtgcctcaggagaaggtcattccttcggtggtcatagag

SEQ ID NO: 48469 - DNA, 1959 bp, Homo Sapiens
atgccgaaagtagtgtctcggtcagtagtctgctctgacactcgggaccgggaggaatatgacgacggcgagaagcccctccatgtttactactgtttgtgcggccagatggtcctagtgctggactgccagttagagaaattgcccatgaggccccgggaccggtcccgtgtgattgatgctgccaaacatgcccataagttttgtaacacagaagatgaggagactatgtatctgcggagacctgaaggcattgaacgacagtacaggaagaaatgtgcaaagtgtggactgccgctcttctaccaatcccagccaaagaatgctcctgttaccttcattgtggatggagcagtagtcaagtttggccagggctttgggaaaacgaacatatatactcagaaacaagagcctcctaagaaggtgatgatgaccaaacggaccaaagacatgggcaagttcagttctgtcaccgtgtctaccattgatgaagaggaagaggagattgaggctagggaagttgctgactcatatgcacagaatgccaaagtgattgaaaaacagctggagcgcaaaggcatgagcaagaggcgactgcaagagctggctgaattggaagccaagaaagcgaaaatgaaggggaccttgattgacaaccagttcaaataaccaggcctttttctaagccctagactagaggcaagcatttagatcaggaggcaaagtaatttcttgattacatagacggattcctatttatgccctagcagaaggctttacgttgtttcccattgattctcctacattcagtgaggtctttaactgagtccatttaacttgctttcttttttttttttttttttttgagataaagtcttgctctttcgcccaggatggagtgcagtggtgcgatctcggctcactgcaacctccgcctcccgggttcaagcagttctcctgcctcagcctcctgagtagctgggattacaggcatgtgccaccacgcctggctaatttttgtatttttagtagagacgggttccaccatgttggccaggctggtctccaactcctgacctcaaatgatccacccacctaggcctcccaaagtgctgggattacaggagtgagccaccgtgcccagccttgccctgctttctaggagatggagttttctgaatttttctgtatttaggttttctgtactattttttgtccacttgatgcaaacttcttcagctgtgtagaaactttatgaatagatgagtgcttgagtgtctccagtctctaaagtggctgcttttattctttcttcaaagttaataacatgttgcaagatttttggacaaaatattatggtgtgtcataggaaaagcaccatgaattatatttaggtatagcaagtcagatcctttgaagtgactctgtctctgttcttagaagggttcttggaattggctgtggtttgaatctttctactgtcagaggagacccattaaaagccagaatctgcataaagctttctttacttcaaacactgaagctgtaggcgagccatcccgtatcgactttatactcaaagaaggaaaagccagattgcagtgagtgggtaggacagctcagatccaaatgaaagtagggtctcaagtaacccaagggtggccgggtacggtggctcacgcctgtaatcctagcagtttgggaggcagaggcgggcagattgcctgagctcaggagtttgagaccagcctgggcaacatggtgaaaccctgtctctactaaaatacaaaagaaattagccaggtgtggcggcatacccctgtagtcacggctacttgggaggcagaggcaggagaattgcttgaactcgggaggtggaggttgcagtgagctgagattgcaccactgtactccagcactccagcctgggcgacagagtgagactctgtctctacaaaa

SEQ ID NO: 48470 - DNA, 722 bp, Homo Sapiens
catcatcgaggccctgctgccgctgagcatggaggccaagatcaagcaggagatcacagagggggaactcaaggccttcatgacagcgcccggcggcaagaagacgcccgccatgcgcaaggtgctctacccctgccgcttctgcaaccaggtgtttgccttctcgggggtcttgcgtgcccacgtgcgctcccacctgggcatctcgccataccagtgcaacatctgcgactacatcgccgccgacaaggccgcgctcatccgccacctgcgcacgcacagtggggagcggccctacatttgcaagatctgccactaccccttcactgtcaaagccaactgcgagcggcacctgcgcaagaagcacctcaaggccacccgcaaggatatcgagaagaacatcgagtatgtgagtagcagcgcggccgagctggtggacgccttctgcgccccggacaccgtgtgccggctgtgcggcgaggacctcaagcactatcgtgccctgcgcatccacatgcgcacgcactgcggccgcggcctgggcgggggccacaagggccgcaagcccttcgagtgcaaggagtgcagcgccgcgttcgcggccaagcgcaactgcatccaccacatcctcaagcagcacctgcacaagatcacctgtccccactgtccccgggttttcccttgggccagctccctacagaggcacatgctcacacacactg

SEQ ID NO: 48471 - DNA, 663 bp, Homo Sapiens
atgaggcgcagcaaggcctacggggagcggtacgtcgcctcggtgcagggctccgccccgtcgcctggaaagaagttgagaggattctattttgcaaagctgtattatgaagctaaagaatatgatcttgctaaaaaatacgtatgtacttaccttagtgtgcaagagagggatcccagagctcacagatttctgggtcttctttatgaattggaagaaaacacagagaaagccgttgaatgttacaggcgttcactggaattaaacccaccacaaaaagatcttgtgttgaagattgcagaattgctttgtaaaaatgatgttactgatggaagagcaaaatactgggttgaaagggcagcgaaacttttcccaggaagtcctgcaatttataaactaaaggaacatcttctagattgtgaaggtgaagatggatggaataaactttttgactggattcagtcagaactttatgtaagacctgatgacgtccatatgaacatccggctagtggagttgtatcgctcaaataaaagattgaaggatgctgtggcccgctgccatgaggcagagaggaacatagctttgcgttcaagtttagagtggaattcgtgtgttgtacagacccttaaggtagataaaagctattgggtctttacattt

SEQ ID NO: 48472 - DNA, 417 bp, Homo Sapiens
atggtggagctgcagcagctgcgggtgcaggaggtggtggactccatggtgaagagtctggaaagggagaacatctggaagacacagggtctcatgttctggtgcagcgccagctgttgtgaggacagccaggcattcacccagcaggtgcaccagtgcatcgagtgctgccctgtgcctctggctcaagtccaggccttggtcaccagtgagttggagaagttccaggaccacctggctcggtgcaccatgcattgcaatgacaaagccaaagattcaatagatgctgggagtaaggagcttcaggtgaagcagcagctggacggttgtgtgaccaagtgtgtggatgaccacatccacctcatctcaactatgaccaagaagatgaaggaggctgtcttatccattgggaaataa

SEQ ID NO: 48473 - DNA, 399 bp, Homo Sapiens
atggataatctgctggaggccttgcagtccggggctgccttccgcgacagaagaaaaaggacaccgatgccaaaagatgttcggcagagtctcagtccaatgtctcagaggcctgttctgaaagtttgtaaccatgaaaatcagaaagtgcagttgacagaagggtcacgttcacactacaatatcaattgcaactcaacaaggactccagtcgccaaggagcttaattataatctagacactcatacgtctactgggaggatcaaggcagctgagaagaaggaagcgtgtaatgtagaaagcaacagaaaaaaggaaacggaacttcttggctctttttctaaaaatgaatcagttcccgaagttgaagccctgctggcaagattacgagctttataa

SEQ ID NO: 48474 - DNA, 762 bp, Homo Sapiens
atgtgccattctgagtttgatgatcgaatccggggcaacggtatggagcccgacagcttagacgaggaggaaagccctcgatggggaagcctgcacgagatggaagaggaagcaagtggaaaagcagctcagatggctcgcgagcaaaaccaccatacctgggaccagggcgccaataacaggcaacaaccaatagaagacaaatattcagacctccgctatgacccgaactggaagagtaagaaggaggaagggcagctgctgtctgtggaagcgttgccggagtccacggacagctctttagaaaatctgcctttggctcccctctacccttcccaggagacgtcaatggaactctccgggggaaaaggcgagcagaaagagagtccacagagtgcagcttctttacttggtagtgaatttttaagcccaaactatgagcatggtgcccgtcgcagcaagccgttttcagagctgagcgacagtgacctggaggagaagtcgagcagcctttctccgtacgtgaagagctcaagttcacataacgaggttttcctgccgggatcacgtggccctcggcgaaggaaatccaaacaacattttgtggaaaaaaacaagctcactttgggattacccaccccgaaaacggactcttatcttcaacttcacaataaaaaaagaggggaatctcatccagaacaggtcattttgagagtaaattctctcccacgtgatggattcaaaaccttttggagccagtaa

SEQ ID NO: 48475 - DNA, 831 bp, Homo Sapiens
agaactgttcaagctaagccaagtagtagcagtaaaacttctgatcctctagcatcaaaaactacaactacaaaagccccttccgtgaaacccaaagttaaacagccaaaagtaaaggctgagccaccaccaaagaaacggaaaaaatggaaagaagaattttcatcatcccaatctgactcatctcctgagatccatactagtagtagtgacgatgaggaatttgaacctcccgctccctttgtcactcgctttttgaacacaagagcaatgaaggaaacctttaagagctacatggaattgcttgttagcattgccttggaccctgacacaatgcaagccttagagaagagcaatgatgagctacttttacctcatatgaaaaaaatagatggcatgctaaatgataaccgaaagagacttcttttgaatcttcatttggatcaatcattcaagaatgctttggaaagttttcctgaactaacaataattactcgagattctaaagcaaagagtggaggaactgctatttctaaaatcaaaatgaatggcaaagcctataataagaaaactctaaggacttctaaaacaaccaccaaatctgcacaagagtttgctgtcgatccagagaaaatacagttgtattctttgtatcattcactccatcattataagtaccatgtttatctgatatgtaaggatgagatttcttcggtgcagaaaaaaaatgaagatttaggacaggaggaaattgttcaactttgtatgaaaaatgtaaaatgggtggaggacctctttgaaaaatttggagaacttctaaatcatgtacag

SEQ ID NO: 48476 - DNA, 699 bp, Homo Sapiens
atggacagcaaccatcaaagtaattacaaactcagtaaaactgagaagaagttcttaaggaaacagattaaagccaagcatactttgctgagacatgaaggcattgagacagtatcctatgccactcagagcctggttgttgccaatggtggtttgggtaatggtgtgagtcggaaccagctgctcccggttttagagaaatgtggactggtggatgctctcttaatgccacctaacaagccgtactcatttgcaagatacagaactacagaagaatctaagagagcctatgttaccctcaatggaaaagaagtagtggatgatttaggacaaaagatcactctgtatttgaattttgtggaaaaagtgcagtggaaggagttgaggcctcaagccttaccaccaggactcatggtagtagaagaaataatttcttctgaggaggagaaaatgcttttggaaagtgttgattggacagaagatacagacaatcaaaactctcaaaaatccttaaaacacagaagagtaaagcattttggttatgagttccactatgagaacaacaatgtagataaagataagccattatctgggggtcttcctgacatttgtgaaagctttttggagaaatggttgaggaaaggttacattaaacataaacctgatcaaatgaccataaatcagtatgaacctgggcaa

SEQ ID NO: 48477 - DNA, 831 bp, Homo Sapiens
tgtaaggagtgtgggaaagccttcagctgtccctcatactttcgagaacatgtcagaacacacactggagagaaaccgtatgaatgtaagcattgtggaaaatcattcagctgttactcctcctttagagatcacgtgaggacgcacactggagagaaaccctgtcagtgtaaacattgcggaaaagcgttcacttgttactcgtctcttcgagaacatgggagaacgcacagtggagagaaaccctatgaatgtaaggaatgcggcaaagccttcaggtacccctcctctctgcgagcacacatgagaatgcacaccggagagaagccctatgtgtgcaagcagtgtgggaaggccttcggatgtcccacttactttagaagacatgtgaaaacacacagcggggtgaagccctatcaatgtaaagagtgtgggaaagcctacagtttttcctcctcccttcgaatccacgtgaggacgcatactggagagaagccctttgagtgtaagcattgtgggaaagccttcagctgtcactcctcccttcgagagcatgtgcgaacccacagcggagagaaaccgtacgaatgtaatcaatgtgggaaagccttcagccacgctcagtactttcaaaagcatgtgagatcacacagtggggtcaaaccctacgaatgtactgaatgtgggaaagcctacagttgttcctcgtcccttcgtgtgcacgtgagaacgcacactggagagagaccgtatgaatgcaagcagtgtgggaaaaccttcaggtatctcgcatcgcttcaagcacatgtgagaacacatgctggagcgtga

SEQ ID NO: 48478 - DNA, 1879 bp, Homo Sapiens
tctagttgctttatatgtacttgctacgtaggaggcagtgttctggacattggagatggagtagtgactgacacatacccaaacagttatttccctcatgaagagtattttcttactttctgtctcacagacttgctagtcactgttgatccttggcaaagacctgtgagacacagagcttgtttagagaagttcgccatttctccctgccagagggactcttcttcagacccccagcgggccccaatagtcctcactgatgctttgattgaggggctaagaatactgatgtgcatagagaggcttgttagcttcagctgcagtgagatctggtaggtaaataaacttaaggacaagtggatgtgaggaggagccgctagagcctggttattaccagggcacattgcagagtcctccagatgtaaacattttgctgattaaattgatgatttggcaggaaccgtatctctaaggtgcgactctcaagacttccctgatttattgcaggagatgctgtttactctgacagtctcaaaaacacccattaattgttccgggtcccttttgtgcttcttgacttccccgtggggtgtttcacatagatgttattgagtatgactggggagaacatgataatttgttgcttcttgacttccccgtggggtgtttcacatagatgttattgagtatgactggggagaacatgataatttctttgactggagctgcttgcttgcctcttaatgccaggagttgcaaagtccaaggccaaaaggatagccctacaggtggtcccctcgtggcaggtggtcaaatgggttggactctgtgtaagacacttgggagtagagggagtatggagaaatggaaagctaaagggcccacccagggggacagttgtgtctggaagcttgccagagtcatgggcctcatcttgggatgggccagtgtcttcagaacattaaacgctgatttgcatgtactgttctaaacactctgtgtgttttagcttgattactcacaatggctccatgagtaaagtaggtctgtctactacttcttccccacctttttcttaatagacaaggaaactgaggcatggagatgttacatcaggttgctggagctgggcagatcctggagcctgtgcactgctactgcctttatatgtctcctctgatttcatttgttggtgtctaaatcgaataccttacaaaccagtgtagacctgataccctgtgggctaaaacaaaacctgagtgtgcactgtattgggcttgtgagcagtcagcttgtgacctctgttctgtggttttattggcacgtagcagtacaaggatggtgaggggtgggtagggggcagacagctaggcacttgaaaggaaagctcatctggaaagattggatcgtctcaaatgcacatactcgtacactcgattgaagcgtactctgtgcctactagatcttttcacagccaaaacacctggcaacccttggagaagtaactattcctttttttcacaagtaagaaaatagagcctcagaaaatttaacagttgtctaagctagaaagtagcaggactggactttgaagtagtctttaggttgtgctgtacattttgtggatatgcttaaatcacagtttagcttgtacacattttcctttattagaattggaagtaagtattaatgtttgaaaaaatattttagcctgacaatatttattctatcttcatatgtttttgaaattagatattttaaactaggcacggtggctcacgcatgtaatctcagcagtttgggaggccgaggcaggcaggtcacaaggtcaggagctccagaccagcctgaccgacatggtgaaaccctatctctacca

SEQ ID NO: 48479 - DNA, 1002 bp, Homo Sapiens
atggtgaaggtgaaggccagagtcaacgaatttggctatactgggtgcctggtcactagggctgcttttaactctggtaaagtggatattgttgccatcaatgaccccttcattgacctcaactacctggcctacatgctccagtatgattccacccatggcaagttccatggcaccatcaaggctgagaatgggaagcttgtcatcaatggaaatcccattacccttccaggagtaagacccaccaaaatcaaatggggcgatgctggcactgagtacgttgtggagtccaccagcatcttcaccgccatggagaaggttggggctcatttgcagaggggagccaaaagggtcatgatctttgccccctctactgaagccatcatgttcatgatgaaagtgaattatgagaagtatgacaacagccttaagatcatcagcaatgcctcctgtaccaccaactgcttagcgcccctggccaaggtcatccatgacaactctggtattgttgaaagactcatgattacagtccatgtcatcactaccacccagaaaactgtggatggcccttgcaggaaactgcggcctgatggccacagggctctccagaacatcatacctgcatctactagcactgccaaggcaatggtcaaggtcatccctgagctgaacaagaagctcactggcatggcctcccatgtccccactgccaaggtgttggtcgtggacccgacctgctctggaaaacctgccaaatattatgacatcaagaagatgatgaagcaggcttcagaggatcctatcaagggcatcctgggctacactgagcaccagattgtctcctccgacttcaacagtgacacacagtcttccacctttgatgctggggctggcattaccctcaacgaccactttgtcaagctcatttcctggtatgacaatgaatttggctacagcaacagggtggtggacctcatggcccacatggcttccaaggaataa

SEQ ID NO: 48480 - DNA, 1599 bp, Homo Sapiens
gccacacaggctccttggagtaagagtgtgagaaactggatgaagacagctgtattcttttggaagcgttcgagattggtctgtctctaccaactaaaaacttctagcttaagtgcagagatttaaggagatcaacaaaaactcagtctagacatattatgaggctgggagggtatcaacagacttgagttcttgtcagcaagatcacctgcttttaatattgtcctcagggtctgagcacatctggaagtgaggtcaatcaagttagaccccaaaaacttttgtgacaacagtgaagaggggaaaataaacacaccacaaacatgaacctcaaccccccgacatctgctcttcagatcgagggcaaaggcagccatattatggctagaaatgtaagctgctttctagtcaggcacacccctcatcccagaagagtctgccacatcaaaggcttgaataacattccaatctgtactgtgaatgatgatgagaatgcatttggaacattgtggggagttggccagtctaactacttagagaagaacaggataccatttgccaattgcagttacccctccagcactgcagtccaggagagccctgtaagaggaatgtcgccagccccaaacggtgccaaagtgcctccacggcctcattctgagcccagtagaaaaattaaagagtgcttcaaaacttccagtgagaatcccttagtaattaaaaaggaagaaattaaggccaaaagaccaccatcacctccaaaggcatgctctactcctggctcctgttcttcagggatgacaagtaccaagaatgatgtgaaagcaaacaccatttgcataccaaactatctggatcaggaaataaaaatcctggcaaagctctgtagcattttgcatactgattctctggcagaagttttacagtggctgcttcatgcaacttcaaaagaaaaagagtgggtctcagctttgattcattctgagcttgccgagataaacctgttaactcatcacagaagaaacacctcaatggaaccagcagcagagactgggaagccacccacagttaaatcaccacccacagttaaattgcccccaaattttactgcaaaatcaaaagtgctgaccagagatacagaaggggatcaaccaaccagagtgtcaagtcaaggatctgaagaaaacaaggaagtaccaaaagaggctgagcacaagcctccactacttataagaagaaataatatgaaaatacctgttgcagaatatttcagcaaaccaaattctcctcccaggcctaacactcaggagagtggatcagcaaaaccagtgtcagcaaggagtatacaagaatacaacctctgtccccaaagagcatgttatccttcaacacaccggaggtagaagttctagactgggtgaattctttcatgaatatgagcttcacatttacatcatcaaattatttttcaaatgaatatttttggtattgaggaatcaagtggtcctctttatggtggcacatgtaaatctaaaaatacctgtatgtaatgctacaaataaatattactggaaatgatatttccatttgtagttaata

SEQ ID NO: 48481 - DNA, 332 bp, Homo Sapiens
ggttgcgacggaggtaggcttacgaggcctgtgtcgggtagaaagggtccttcctggaccgggaccctctgccacgaccatggaccgtaggaaaaagcctttggacgtcacggcctcctcgttggtagatcttaaggctgaactcttccgaaagcaagaagaattcaaacaagaaaaacttctaaaagattctggagtttttggaaaaccaaaaacaactaacaagaaaccaagtatctggagcaaacagaatgtaggcgtttcaaatcgagctgagaaggatgctgaacagaagattgaagaacagaagactttagacaaagcaaggtaaa

SEQ ID NO: 48482 - DNA, 375 bp, Homo Sapiens
cagtttgagaacctctgcaagctcctggaagaaaacttgaagaagaaaactgagaaagtgaaaatctccaatagtctgtttcttcatcctgcagctgcagtcacaggttatgactggcacctacagctgaacagccaatatgaagtagcttgtgaaagctcagacactgacaactctataatgggctacatgatggccaaaaagcacctggaaatcaaccttgaccaacctattgtggagacactgcagcagaaggctgaggtggacaaggacgacaaagctgtcaaagacctgggggtgctgctgtttgaaactgtggggctctcttctggcttctcccctgaggattctcagacctactccaatagcatctac

SEQ ID NO: 48483 - DNA, 303 bp, Homo Sapiens
atggcctccctctccgagctcgcctacatctactcggccctcattctgcataatgataaaatcaatgccctcattaaagcagctggtgtaaatgttgaacctttctggcctggcgtgtttgcaaaggccctagccaatgtcagcatcgggaaccccatctgcaatgtaagggctggtggacttgcagcagctggagatcctaccccctccactgctgctgcttcagttgagaagaaagtggaagcaaagaaagaagaatccgaggaatctgatgaggacatgggctttggtctttttgactaa

SEQ ID NO: 48484 - DNA, 4875 bp, Homo Sapiens
atggagcggtgcagccgctgccatcgcctcctcctcctcctacctctggtgctggggctgagcgcggccccaggctgggcaggtgcaccccctgtggatgtgctccgggccctgaggttcccctccctccctgatggtgtccggagagcgaaaggcatctgtccagctgatgtggcctaccgagtggcacgacctgcccagctcagtgcacccactcgccagcttttcccaggaggatttcccaaagatttctctctgctgactgttgtccggacccgccctggtctccaagctcccctcctgactctctacagtgcccagggtgtccgacagctgggcctggagctgggccgacctgtccgcttcctgtatgaagaccagactgggcggcctcaacctccctctcagccagtcttccgaggcctcagcctagcagatggcaagtggcaccgtgtggctgtggctgtgaagggccagtctgtcaccctcattgttgactgcaagaagcgagtcacccggcctctcccccgaagtgctcgtccagtattggacacccatggagtgatcatctttggtgcccgtattctggatgaagaagtctttgagggtgatgtccaggagctggccattgtcccaggggtccaggcagcctatgaatcatgtgaacagaaggagctggaatgcgaggggggccagagggaaagaccccaaaaccaacagcctcacagagcccagagatctccacagcagcaaccatcaagacttcacaggccacaaaatcaggaaccccagagccaggctgcccatggaccccgagggctgaagggagagaaaggagagcctgcagtgttggaacctggtatgctcgtggaggggccccctggcccagaaggccctgcgggattgattggtccccctggcatccaggggaacccaggcccagttggagaccctggagagaggggcccccctggccgagcagggctccctggatcagatggggctcctggtcctcctggcacatctctcatgctcccattccggtttggcagtggtgggggtgacaagggccctgtggtggcggcccaggaggctcaggcccaggcgatcctgcagcaggcgaggctggcgctccgtggaccccctggccccatgggatacacagggcgccctggacccttgggccaacctgggagccctggcctgaaaggagagtctggagacttaggacctcagggccccagaggacctcagggcctcacaggccctcctggcaaggctgggcgaaggggccgggcaggtgctgatggagcccgagggatgcctggagatcctggagtgaagggtgaccgaggttttgatggactcccagggctccctggagagaagggccataggggtgatactggtgcccagggccttcctggtccccctggtgaggatggagagaggggagatgacggggagattgggcctcgagggctgcctggagagtcgggacctcgaggtctccttggccccaaaggcccacctggtattcctggaccccctgtaagtgactccctgacttctgaccctggtgaccccttgacctctccaactctccacctttctagctgccttcctgctccctctcctctctcggcatgcttcccattccctgtgagctccccctgctctggccccacactgccctgcctcagcattcgctccccgtgcacagggagggccattgacactctgaggcccctttataaatgcctctcttttatcttccagggtccctctggacctcagggtcctctaggatacccaggacctcgaggggtcaagggtgtggacggaattcggggtctgaagggtcataagggtgagaagggtgaggatggctttcctgggttcaaaggtgacataggcgtgaaaggtgacaggggcgaagttggagtccctggttccaggggagaggatggtcctgaggggccaaagggacgcactggaccgactggagaccctgggcccccagggctcatgggcgagaagggcaagctgggtgttcctggtctgcctggctatcctggacgtcagggacccaaggggtccctaggatttcctggctttcctggtgccagtggagagaagggagcccggggcctgtcggggaagtcagggcctcggggagaacggggccccacgggtccacggggtcagcggggaccccgaggtgccactgggaagtctggagctaagggaacatctggtggtgatggcccccatgggccccctggagagaggggcctccctggacctcagggtcccaacgggtttcctggaccgaaaggacccctgggcccccctgggaaggacgggctgccgggacacccaggccaaagaggagaagtgggtttccaagggaagaccggcccccctggtcctccaggagtggtgggacctcagggagcagcaggagaaaccggccctatgggggagagaggtcacccaggccccccggggccccctggagagcagggactacctgggacagctggaaaagaaggaacaaagggtgaccctggtccccctggggccccagggaaggatggtcctgctggtctgaggggattcccaggagagagaggcctcccaggcactgctggtggacctggtttgaaggggaatgaaggtccgtctggcccccctggccctgcaggctcccctggggaacgaggtgcagcaggatcagggggacccattggtccgccagggcgcccaggcccgcagggtccccctggagcagcaggagagaaaggtgtcccaggtgagaagggccccattggcccaactggccgagatggagtgcagggtcctgtggggcttcctggtcctgctgggcctccaggtgtggctggagaggatggagacaagggtgaggtgggggaccccggacagaagggcaccaaagggaacaagggtgaacatggccctcctggaccccctggacccattggtcctgtggggcagcctggagcagcgggagcagatggggagcccggagctcggggaccccagggacactttggagccaaaggtgatgaaggaacaagaggattcaatgggcccccaggacccattggcctacagggtttgccaggcccctctggggagaagggagaaacaggagatgtgggtcctatgggaccacctggccccccaggacctcgaggtccagctggacccaatggcgctgatggcccacaaggtcccccaggaggtgttgggaacctgggtccccctggagagaagggggaaccaggagagtcaggatctccagggatccagggcgagccaggtgtcaagggtccacgcggggaacgtggagagaaaggagagtcggggcagccaggagagccagggccaccagggcctaaaggccccacaggcgatgatggccccaaagggaaccctggtcctgttggttttcctggtgaccctggcccccctggagaaggtggccctcggggccaggatggtgctaagggtgaccgaggcgaggatggtgagccaggacagcctggatcccctggtcccaccggggagaatggacccccagggccacttggaaagcgaggtcctgctggctcgcctggttccgaggggcgacaaggagggaagggagccaagggagatcctggcgctataggtgccccggggaagacaggcccggtgggtcctgcaggcccagcagggaaacctggccctgatggtctgagggggctcccaggctcagtgggtcagcaaggccgacctggagctacaggccaggctgggcccccaggtcctgtgggacccccagggctgcctggtctccggggcgatgctggagccaagggagagaagggccacccaggtctcattggactgattgggcccccgggtgagcagggagagaagggagatcggggacttcctgggcctcagggctcccctgggcagaagggtgagatgggtatcccaggagcatccggccccattggtcctggaggtccccccggcctccccggacctgctggccccaaaggagccaaaggagccacaggcccaggcggacccaagggagagaagggtgtgcagggccctccaggacacccgggtcccccaggcgaggtgatccagccactgcccattcagatgcccaagaagactcggcgctcggtggatggaagccgtctgatgcaggaagatgaggccataccgaccgggggagcccccggcagtcctggggggctggaggagatctttggctcactcgactccctgcgggaggagatcgagcagatgaggcggccaacagggacccaggacagccctgctcgcacctgccaggacctgaagctgtgccacccagagcttcccgatggagagtactgggtcgaccccaaccagggctgtgctcgggatgccttccgagttttctgcaacttcacagcagggggtgagacctgtgtgacgcctagggatgacgtcacgcagttctcttacgtggactcagagggctccccagtgggtgtggtccagctcaccttcctgcggctgctcagcgtctcagcccaccaggacgtctcctacccctgctctggagcagcccgtgacggtcccctgagactccgtggggccaatgaggatgagctgagcccggagactagcccctatgtcaaagaattcagagatggctgccagacacagcaaggccggacggtgctggaggtgcgaacgcctgtgctggagcagctgccagtgctggatgcctccttctcagacctgggagccccaccgaggcggggaggggtgctgctggggcctgtctgcttcatgggatag

SEQ ID NO: 48485 - DNA, 915 bp, Homo Sapiens
gggagcatgctggggctctgggggcagcggctccccgcggcgtgggtcctgcttctgttgcctttcctgccgctgctgctgcttgcagcccccgcgccccaccgcgagtcctacaagccggtcatcgtggtgcatgggctcttcgacagctcgtacagcttccgccacctgctggaatacatcaatgagacacaccccgggactgtggtgacagtgctcgatctcttcgatgggagagagagcttgcgacccctgtgggaacaggtgcaagggttccgagaggctgtggtccccatcatggcaaaggcccctcaaggggtgcatctcatctgctactcgcaggggggccttgtgtgccgggctctgctttctgtcatggatgatcacaacgtggattctttcatctccctctcctctccacagatgggacagtatggagacacggactacttgaagtggctgttccccacctccatgcggtctaacctctatcggatctgctatagcccctggggccaggaattctccatctgcaactactggcatgatccccaccacgatgacttgtacctcaatgccagcagcttcctggccctgatcaatggggaaagagaccatcccaatgccacagtatggcggaagaactttctgcgtgtgggccacctggtgctgattgggggccctgatgatggtgttattactccctggcagtccagcttctttggtttctatgatgcaaatgagaccgtcctggagatggaggagcaactggtttatctgcgggattcttttgggttgaagactctattggcccggggggccatagtgaggtgtccaatggccggtatctcccacacagcctggcactccaaccgtaccctttatgagacctgcattgaaccttggctctcctga

SEQ ID NO: 48486 - DNA, 1020 bp, Homo Sapiens
agttggagtctccagggatcagggttccaggaactcaggatctgcagtgaggaccagacaccactgattgcaggaatgtgttccctccccatggcaagatactacataattaaatatgcagaccagaaggctctatacacaagagatggccagctgctggtgggagatcctgttgcagacaactgctgtgcagagaagatctgcatacttcctaacagaggcttggcccgcaccaaggtccccattttcctggggatccagggagggagccgctgcctggcatgtgtggagacagaagaggggccttccctacagctggaggatgtgaacattgaggaactgtacaaaggtggtgaagaggccacacgcttcaccttcttccagagcagctcaggctccgccttcaggcttgaggctgctgcctggcctggctggttcctgtgtggcccggcagagccccagcagccagtacagctcaccaaggagagtgagccctcagcccgtaccaagttttactttgaacagagctggtagggagacaggaaactgcgttttagccttgtgcccccaaaccaagctcatcctgctcagggtctatggtaggcagaataatgtcccccgaaatatgtccacatcctaatcccaagatctgtgcatatgttaccatacatgtccaaagaggttttgcaaatgtgattatgttaaggatcttgaaatgaggagacaatcctgggttatccttgtgggctcagtttaatcacaagaaggaggcaggaagggagagtcagagagagaatggaagataccatgcttctaattttgaagatggagtgaggggccttgagccaacaaatgcaggtgtttttagaaggtggaaaagccaagggaacggattctcctctagagtctccggaaggaacacagctcttgacacatggatttcagctcagtgacacccatttcagacttctgacctccacaactataaaataataaacttgtgttattgtaaacctctaa

SEQ ID NO: 48487 - DNA, 378 bp, Homo Sapiens
atgcagaccacaggggcattactcatttctccagcttggaacctctgttgtacctggggtctaatcaggactgtatctgcctccttcttgaatagcccagataattcacctaaacagccttcctacagcagctccccactgcgggtggccagacgggagttccagaccagtattgtctcccgggacattgacatagcagccaagttgattggtgctggggcagccacagttggtgtggctggttcaggggctggcattggaaaagtgtttggcagcttgatcattggctatgccaggaacctgtctctcaagcagcagctcttctcctatgccactctaggctttgccctatctgaggccatggggctcttctgttga

SEQ ID NO: 48488 - DNA, 678 bp, Homo Sapiens
atgacctccgagttcttctctgcccagctccgggcccagatctctgacgacaccactcacccgatctcctactacaagcccgagttctacatgccggatgacgggggcactgctcacctgtctgtggtcgcagaggacggcagtgctgtgtccgccaccagcaccatcaacctctactttggctccaaggtgcgctccccagtcagcgggatcctgctcaataatgaaatggatgacttcagctctaccagcatcaccaacgagtttggggtacccccctcacctgccaatttcatccagccagggaagcagccgctctcgtccatgtgcccgacgatcatggtgggccaggacggccaggtccggatggtggtgggagctgccgggggcacgcagatcaccatggccactgcactggccatcatctacaacctctggttcggctatgacgtgaagtgggccgtggaggagccccggctgcacaaccagcttctgcccaacgtcacgacagtggagagaaacattgaccaggaagtgactgcagccctggagacccggcaccatcacacccagatcacgtccaccttcattgctgtggtgcaagccatcgtccgcatggctggtggctgggcagctgcctcggactccaggaaaggtggggaacctgctggctactga

SEQ ID NO: 48489 - DNA, 1992 bp, Homo Sapiens
ttggtcaagaaattacgtatttagtcaaaccttctaagggtatttttcattcggacagtgaattaaatcagaatattaggtattaaaaagccatcttctacattgttgcctcagtgttgaatacaattccaaatctgacccatttttgtgcttaaaatatagtaaaatctatccattccttatatcataataaagcacaatatctttcactcatatactcattacatatacattgtcccctaccatattatcatatctactatatctcttttagatattaaagacccagaaataaagaaaacagtgattgtctctattttaaagagcaggttagtaaaatggtttcaagtgttatgaaagctgtaaggtttgaaagacagaaagaaatttggagttggttaaagacgccctaacgtgaaggatgaaaaactatcttgttatttgaagagtaaaagaaagtagctttcttccaatcagagagaagaataaataaaatcttcagtgtaaaactgggttctctgggttcaatgagcagaaagctgttctgttttcttgggacttggtgaacctttttgaaacagagcaaagtgagtcgaaaagacagtctagaaacctttcaagattatttgttccatgggattgactttagatcctatatttaatagagagatgttgaggctttttttttttaagatggagtttcgccctttttaagcaaggaaggtatatgatctgattatatttgaaaatatgggctcggggttgttcagggcggggtgggctctggacccagcaggcccggcacccaggctaggcctccaggggaggccaggtggggtgaaggccaagaaggggccggggctggtcaggaagggctcctggtgaccagagcactttgcttgagccagcgtgggagggaggtgggctggatgagccagggaggcgctggtaggggccttggcagacgcaacctcctccgtcagccccaaggccactgaaccctgcgtagcgagaaccgggagggggggctgcagacggaggagtggaggctccttggctttgggggctttgagtagaagcatctaggggtccctcaagaggccccgaaatgctgccccatggtgagaaaaggcgcggagaggcgcatggcaccggcgcaggtgcggagagtcgcacaggagacctcaggcccaggctccactccccagctgtgaaagtaccactggcaggacacccaagctagcccgccaggcctccatagagctgcccagcatggccgtggccagtaccaagagtcggtgggagacgggtgaggtacaggctcagtctgcagccaagactctgtcctgcaaggatattgtggctggagacatgagcaacaaaagcttctgggagcagaagggaggctccaagacctcatcaacaattacggcccagattgccttcctacagggagaaaggaagggccaagaaaatttgaagaaggatctcgtgaggatgatcagaatgttggagtatgctcttaaacagaaaagagccaaataccacaagttgaaatatgggacagaattgaatcagggagctatgaagcctccaagctatgattctgatgaaggtaatgaaacagaagtgcagccacaacaaaacagccagttaatgtgaaaacaaggtcgacaactactcaggcagcgtcatgataacgtgaacagaaggtagttcagtttctccagattaccacagaagacagctctgtggatcctcctcagatgagatgatttaatgtggtattggggaaatgagaagccgtcggagcacaagcgctccctgagggtgggccaccactccggctggtagtcttccatactcgtctgctgcaaattgtatcctgggaactctccagccgtatttcagctcgccttcggggatctccgcctccgaagcgcaacaacaagcaatgcggtccgtccacggacctttgcacatactctcagc

SEQ ID NO: 48490 - DNA, 675 bp, Homo Sapiens
ttctgtggcatacaggacattgtggtacaggaagggactcactttctcatgccatgggtacagaaaccaattttctttctgatgttcccatgtaatgtgccagtcatcactggtagcaaagacttacagaatgtcaacatcatactttgtatcctcttctggcctgttgctagccagtttgcgcacatcttcaccagcatcggagaggactacaatgactctgtgctgccatccatcactaccaagaccctcaagtcagtggtggctcactttgatgcaggagaactgatcacccaaagagagctggtctccaggcaggtcatctttgggctcatccacccacctttgggcaagcagccacctttggatggcatgtccttgacacatctgacctttgagaaggagttcacagaagcggtggaagccaaacaattggctcagcaggaagcagagagggccagatttgtggtggaaaaggctgagcatcagaagaaggcagccatcatctttgccgacggcaactccaagacagcagagctgatccccaactcactggccatggcggggacactgattgagctgtgtaagttggaagcagcggacattgcattccagctctcatactctgggaacgtcacctacctgcctgtggggcagtccatgctcctccagctg

SEQ ID NO: 48491 - DNA, 339 bp, Homo Sapiens
gagccaatgttgcaattcacacccaagggccatcagccttggaagttctctcttgcttggggaaggtcaggatttgtactactcagatctttaactgattggttcaggcatggccacataatggagggccatctgcttgattcaaagtccactgacttaaatgttagtctcactcaaaaacaccctcatagaaacatccagaataatgttccaaatatctgggcaccccaatcgagttgtcacagaggaataaccaccccaaggggcaaaggtgaatgtgaagcaggagaagttgtgggacgtgtctgtgtgtggaagttttatccggtccttcactga

SEQ ID NO: 48492 - DNA, 1462 bp, Homo Sapiens
ggggaaatggcggcttcaggagagagcgggactttgggcggcggaggcggcacagaggaagcatttatgacctcctacagggaaacaaatagagaagggagacttggttctaacatccaaaaaccacattgaaagactgacccgtcctggttcctcttacttcaatttgaacccatttgagtttcttcagatagatcctgaagttacagatgaagaaataaaaaagaggtttcggcagttatccatcttggtgcatcctgacaaaaatgaagatgatgctgacagagcacaaaaggcttttgaaactgtggacaaagcttacaagttgctactgatcaggagcaaaagaagacctggatgtaatttaggcaggaaaagaatacgtggaacacactgtgaaagagagaaaaaaaaaaaacaatcaaagaaggaaggaaaacctacgattgtagaggaggatgatcctgagctgttcaaacaagctgtatataaacagaaaatgaaactctttgctcagctggaaattaaaaggaaagagagagaagccaaagagatgcatgaaaggaaacggcaaagggaagaagagattgaagctcaagaaaaagccaaacgagaaagagagtggcagaaaaactttgaggaaggtcgagatggtcgtgtggacagctggcgaaacttccaagtcaatacaaaggggaagaaagagaagaaaaatcggaccttcctgagaccaccgaaagtaaaaatggagcagcatgagtgaccacccggggtcacaggcacagaaccttccccctgctatctcccttcctgcttcgaaggactcattctttcctcccacttccacctcaacatagagtagtatttgctttttagtctgtttcgttttgaatacaatttaatatcgatcagagtaattcttttgtacaatgaaatgaggggactggtttaaaaaaagaccttcctcctccctgcccctagaacaaccaggattggaaggtggcaccattggtgctgccttctcttcccacagcctgtaactcagtgttttgtacttcactgaattgtgatggttagaaacttcgtcctagtttgtggaaatcatccaattaaacatattacttaaaatggtgttgctgtgacgtcagagacaggcctggaaggggcactttggaagccccttggcttcagttgctcgcttctgggtgtgctcccttagaaggcccagataagacagggaacacctgtgggcacacagaacaggcacctgatgccctgatgccctgtggtgtttggcatgtgccccctgtctactgaccaatcagcatggcatgaggcccacgccacccaaacctttcactttccaaagagctagccgtcctcctcccagtaccatggtgtcctagcctgtctgcatttgttagtagtaatattctttatgtataataaatttttataacta

SEQ ID NO: 48493 - DNA, 1054 bp, Homo Sapiens
aagccagaccctggcctcagcacaagctccagtgcagaccccagcacccactctgcctggtcctgctcttccagggcccttccctggtggccgtgtggtcaggctgcacccagtccttttggcctccactgtggacagctatgagagacgcaacaagggtgctgcccgagttatcgggaccctgttgggaactgtcaacaaacactctgtggaggtcaccaattgcttttcagtgtcatacaatgagtcagatgaagtggttgttgacatggaatttgctaagaacatgtatgaactgcataaaaaagtttctccaaatgagctcatcttggggtggtacgctgccggccatgacatcacagagcactctgtgctgatccatgagtactacagccgagaggcccccaaccccatccacctcactgtggacacaagtctccagaacggccatatgagcatcaaagcctatgtcagcactttaatgggtgtccctgggaggaccgtgggagtgttcacacctttgacagtgaaatatgcatactatgacactgaatgcatcagagttgacctgatcatgaagacctgctttagccccaacagagtggttggactctcaagtgacctgcagcaagtaggaggggcatcagctcacatccaggatgccctgagcatagtgttgcaatatgcagaggatatactatctgcaaaggtgtcagctgacaatacaatcaggaaggtgggccacttcctgatgagcctggttaaccaagtaccgaaaatagttcccgatgactttgagaccatgctccacagcaacatcaatgacctgttgatggtggcctacctggccaacctcacacagtcacagattgccctcaatgaaaaacgtgtaaacctgtgaagccaccccaagcagtacgcttgctggtctaagtcttaaccccaggactcagaagtgaaggaaaaatgggttttttgtggtcttgagtcacactgagacagtcaactgtgtgtgactctaataaacgtagcctaccttttgtaaattaaagaa

SEQ ID NO: 48494 - DNA, 393 bp, Homo Sapiens
atgtcttccctgtatccaagactctgtcatttgtctctgcagttcctcccactgaagaatcggagtatatttctccagtccctaatgttgggttttgaattgtgtctagctctggccactggaatattaatctgtatgaccaaaaacttggaaagtgtgcattcatttgtgctcgcttactcctgctatcaccatgagaacaaacccagtccagactgctgcttccagcagaagataagacataccaagagcaaagtcgagcttcccagacatgctcatgctagattgactaatcctcagttgacccatagatccatgaaaataaacgattgttgtattaagccactgagatttggagtgacttgttatacagcattttgtgacaacaactaa

SEQ ID NO: 48495 - DNA, 231 bp, Homo Sapiens
atggctcctgcaaagaagggcagcaagaagaaaaaaggccattctatcattgaggtggtgactcaagaaaacaccatcaacattcagaagcatatccatgaagtgggcttcaagaagtgtgcccctcgggcactcaaagagattcagaaatttgccatgaaggagatgggaactccagttgtgctcattgataccaggctcaacaaagctgtctgggccaaaagaataagg

SEQ ID NO: 48496 - DNA, 734 bp, Homo Sapiens
aggcctaaaaaagggtagttgtggttggctctgcctttgctgtctttacctgaatagaggtcaggcccgggtccaggggagcgtcccacggtcccttcagcagcagcatctctaggggaagtggccggctgcagggactgcacggtgaggcaatctgtgagcaggtctggatggagctctgtgctggaccgcaactaagaggacaaaacggaagagacatcgataaggagagccggtccttggaatattttcctgggaaggcatcatgctctatcagtgcaactcagcccacaaaaatttatcaagcagcaactacgggtcctctgaacgggccacaccacggttgagccattgtgacccctgcgacacacaggtccaggcctcctggagtcacaaagctttgagcaacaggagaaccactaaagaagaagaaacagctagctcctgccttaactgattaaccgaacttgcaacattccaccattgtgatatgttcctgccctaccctaaataatcaatcggccttgtgatatcctgccatgtgaactccctccacctcgtgactacgcaccttgtgacattcttcccctgcccgaaaagactgccccaactgtaaccttccactacctatcccaaacctataaaaccagttccactcccaccgcccttcgctgactcccttttcagactcagcccgctcgcaccggagtgaataaacagccttgttgctcaca

SEQ ID NO: 48497 - DNA, 975 bp, Homo Sapiens
atggctgaagttaatatcatttatgtcactgtattcattctgaaaggaattaccaaccggccagagcttcaggccccgtgctttggggtgtttttagttatctatctggtcacagtgctgggcaatcttgggttgattactttaatcaagattgatactcgactccacacacctatgtactatttcctcagccacctggcctttgttgacctttgttactcctctgctattacaccgaagatgatggtgaattttgttgtggaacgcaacaccattcctttccatgcttgtgcaacccaactgggttgttttctcaccttcatgatcactgagtgtttccttctagcctccatggcctacgattgctatgtcgccatctgtagtcccctgcattattcaacactgatgtcaagaagagtctgcattcaactggtggcagttccatatatatacagcttcctggttgccctcttccacaccgttatcactttccgtctgacttactgtggcccaaacttaattaaccatttctattgtgatgacctccccttcttagctctgtcctgctcagacacacacatgaaggaaattctgatatttgcctttgctggctttgatatgatctcttcctcttccattgtcctcacctcctacatctttattattgccgctatcctaaggatccgctctactcaggggcaacacaaagccatttccacctgtggctcccatatggtgactgtcactattttctatggcacactgatctttatgtacctacagcccaaatcaaatcactccttggacacagacaagatggcttctgtattttacacagtggtgatccccatgttaaaccccctaatctatagtctaaggaacaaagaagtgaaagatgcctcaaagaaagccttggataaaggttgtgaaaacttacagatattaacatttttaaaaataagaaaactttattaa

SEQ ID NO: 48498 - DNA, 1545 bp, Homo Sapiens
gcggggcgggccggtgcgcctggcagtcggctgcgtactcctgcgagcgccggagaggggctggaggcggggcgagggcgcggctcgaggcatccctgcagggcgctcctccgagtccctcggcgctctgagcccacagggaagaaggaggggccggcgtcagtgacgtcagcgagaccgaggtgagcgtgggcgttgccagtggtgctctgtcagtgcctatggattatggcagggaaagtaaaatgggtcactgatatcgagaagtcagtgctgatcaataactttgaaaagagaggatgggtccaagtgacagaaaacgaggactggaatttttactggatgagtgtgcaaaccatccgaaatgtgttcagcgttgaagctggatatcggctctcagatgaccaaatagtcaaccattttccaaaccactatgaactgacccggaaggacctgatggtgaagaacatcaaaagatacaggaaggagctggagaaagaagggagtcctctggcagaaaaagatgaaaatggaaaatacctctatctggactttgttccagtcacctatatgctgcccgctgactacaacctgtttgtagaggagttccggaagagcccgtccagcacctggatcatgaagccttgtggcaaggcccagggaaagggcatcttccttatcaacaagctctcacagatcaaaaagtggtcccgggacagcaagacatcttcgtttgtgtctcaatctaataaggaagcctacgtgatctctctctatattaacaacccgttactaattggcgggaggaagttcgacctgcgcttgtacgttctggtgtccacgtaccgtccactgcgctgttacatgtacaagcttgggttttgccggttctgcacagtgaaatacaccccgagtaccagtgagctggacaacatgttcgttcatctcaccaacgtcgccatccagaaacacggggaggactacaaccacatccatgggggcaagtggacagtgagtaacctgcggctctacctggagagcacccgcggcaaggaggtgaccagcaagctgttcgacgagatccactggatcatcgtgcagtccctgaaggctgtggcggtgaatgcgtccccgtctctcacgtccagcactgccaatgaccgaatcctcaagtacaacctgattaatgacaccctcaacatcgccgtcccgaatggtgaaatcccagactgcaaatggaacaagtcgccacctaaggaagtcctcggcaattacgagattctgtatgatgaagaattggcccagggtgacggggctgaccgggagctgagaagccgtcagggtcagtctctggggcccagagcaggccgatcgagagactcggggagagcggtcctcaccacctggaagtgagtcccacctggaccttatcaaaactactcactccacctgggcccctgctgaagccctattttgaaatttcccttttgtagagcttttttcctttcctaagccctgtaaataaacgaaggcacttctttggaa

SEQ ID NO: 48499 - DNA, 860 bp, Homo Sapiens
caactctgttagcaaagctgtttgtctttctcggaaacaacagtaacgataagcctctttgaatatggaggccgctgcagacggcccggctgagacccaaagcccggtggaaaaagacagcccggcgaagacccaaagcccagcccaagacacctcaatcatgtcgagaaataacgcagatacaggcagagttcttgccttaccagagcacaagaagaagcgcaagggaaacttgccagccgagtccgttaagatcctccgcgactggatgtataagcatcggtttaaggcctacccttcagaagaagagaagcaaatgctgtcagagaagaccaatttgtctttgttgcggatttctaactggtttatcaatgctcgcagacgcattctcccggatatgcttcaacagcgtagaaacgaccccatcattggccacaaaacgggcaaagatgcccatgccacccacctgcagagcaccgaggcgtctgtgccggccaagtcagggccagtggtccagacaatgtacaaagcctgcccctgtggcccttgccaaagggccagatgtcaagagagaagcaaccagatccggagtcggcccctagccagaagctcaccggaatagcccagccaaagaaaaaggtcaagatttctatcacttccccgtcttctccagaacttgtgtctccagaggagtacgccgacttcagcagcttcctgctgctagtcgatgcagcagtacaaacggctgccgagctggagctagagaagaagcaagagcctaatccatgattgatgatgttccaaaaacccaagtagtcagtcccttgtgtactgtggtaaacctgtttatgttcacccca

SEQ ID NO: 48500 - DNA, 516 bp, Homo Sapiens
gcccactttgcttttgagtgttcagaaccaagatggttcttgctggaagggctccggagaagcagtaacggccttgtgggttgggctgcagcagagaaatggaccaaacctcccccagccttcatggcccaagccccatcctccctccccaactgactgctgctccaggcaggatggatggagcatgtgcggtgcctcccccgcaaaaatgatgacgaggttaaaggaaaaaataagttacattacagtttccaaaatggttctcgctctccgctgaagatgggccaccgttggggctgcaatgtgctcgcggtcccagcttgtgctttgcaagaagagggaatataactagactgttattttaggttaaaatagccaagagacagacgccttcgcctcaaaaatattctgagacacataaaagtagaaggaaacaagtctcttcagtcacaaaatgtcgtacatcccgcatatactagattcaattaatttaataaaatagaatatacatagaga

SEQ ID NO: 48501 - DNA, 2464 bp, Homo Sapiens
gcggcggcggcgggggcagggaaccgggcagcggtggcggtggcggtggcgcgggcggacgaggcggaggcgcccttcgccgggcagaactggttaaagtcctatggctatctgcttccctatgactcacgggcatctgcgctgcactcagcgaaggccttgcagtcggcagtctccactatgcagcagttttacgggatcccggtcaccggtgtgttggatcagacaacgatcgagtggatgaagaaaccccgatgtggtgtccctgatcacccccacttaagccgtaggcggagaaacaagcgctatgccctgactggacagaagtggaggcaaaaacacatcacctacagcattcacaactataccccaaaagtgggtgagctagacacgcggaaagctattcgccaggctttcgatgtgtggcagaaggtgaccccactgacctttgaagaggtgccataccatgagatcaaaagtgaccggaaggaggcagacatcatgatcttttttgcttctggtttccatggcgacagctccccatttgatggagaagggggattcctggcccatgcctacttccctggcccagggattggaggagacacccactttgactccgatgagccatggacgctaggaaatgccaaccatgacgggaacgacctcttcctggtggctgtgcatgagctgggccacgcgctgggactggagcactccagcgaccccagcgccatcatggcgcccttctaccagtacatggagacgcacaacttcaagctgccccaggacgatctccagggcatccagaagatctatggacccccagccgagcctctggagcccacaaggccactccctacactccccgtccgcaggatccactcaccatcggagaggaaacacgagcgccagcccaggccccctcggccgcccctcggggaccggccatccacaccaggcaccaaacccaacatctgtgacggcaacttcaacacagtggccctcttccggggcgagatgtttgtctttaaggatcgctggttctggcgtctgcgcaataaccgagtgcaggagggctaccccatgcagatcgagcagttctggaagggcctgcctgcccgcatcgacgcagcctatgaaagggccgatgggagatttgtcttcttcaaaggtgacaagtattgggtgtttaaggaggtgacggtggagcctgggtacccccacagcctgggggagctgggcagctgtttgccccgtgaaggcattgacacagctctgcgctgggaacctgtgggcaagacctactttttcaaaggcgagcggtactggcgctacagcgaggagcggcgggccacggaccctggctaccctaagcccatcaccgtgtggaagggcatcccacaggctccccaaggagccttcatcagcaaggaaggatattacacctatttctacaagggccgggactactggaagtttgacaaccagaaactgagcgtggagccaggctacccgcgcaacatcctgcgtgactggatgggctgcaaccagaaggaggtggagcggcggaaggagcggcggctgccccaggacgacgtggacatcatggtgaccatcaacgatgtgccgggctccgtgaacgccgtggccgtggtcatcccctgcatcctgtccctctgcatcctggtgctggtctacaccatcttccagttcaagaacaagacaggccctcagcctgtcacctactataagcggccagtccaggaatgggtgtgagcagcccagagccctctctatccacttggtctggccagccaggcccttcctcaccagggtctgaggggcagctctggccagtgctcaccagggccagcagggccctaggctggggtcgtacagctgaagtggtgggtgcattggcctaggctgagcgtggggcagggaattatgggggctgtgccccagggtgggtgtctggcacccagctgccagccttctgtcctgggcaaactactccctacttaagggaataggccaggctccatccggaggcagggaccatgccaggaggagcccctgtggtcacggcatcctgtggtgtccatgaggtaccacagctccactcctggctggaacccagcaccctctgtgggaagccagcactagctctcatcccccatccgggagataccaccagtcctggtccccttttgccaacacctgctggtcagatgtccccctacccccaccccactgtcctccaaggctacaggacccctgcttctgacacagtgagcaacaagcctgggtttccctgctggcagacggcagatccctcaggaaacctgctccacttgtcagggtctcttcggagacccaggatttagggtcacatgctgcaggcagggctgtggcccagctgggtctgacaaggacccagctgtcacatcgtgaatattta

SEQ ID NO: 48502 - DNA, 819 bp, Homo Sapiens
atggatgagacacaggggcctctggccatgactgtccatcttcttgccaactctgggcacggctcccttctgcagaggactctggaccagctcctggattgcatttgcccagaggtccggctctttcaggtgtctgaacgggccagtcctgtgaaatactgtgaaaagtcccattccaagcggtcccggtttccagggatgtccgtgttgctcttcctgcacgaaagcccgggagaggataggctatttcgcgtcctggactctctccagcattcgccatggcagtgctaccccacccaggacactcggggaaggctgtgtccctacttttttgccaatcaggagttctacagcctggacagtcagctgcccatctggggggtgaggcaggtgcactgtggctccgagatcctgagggtgacgctgtactgcagttttgataactatgaagacgccatcagactctacgagatgatcctgcagagagaagcgaccttgcaaaagagcaatttttgtttcttcgtgctctatgcctccaagagctttgctctgcagctctccctgaagcagctgcccccgggaatgtcagtggaccccaaagagtcttcggtgctgcagtttaaggttcaagagatcggccagttagtgcctctgctacccaatccatgcatgcctatcagcagcaccaggtggcagactcaggactacgatggcaacaagattctgcttcagagatgggagtcttcctctgttgcccagactcgagtgcggtggtgccatcatagctccctgaggtcttcaccttctgggttcaagtga

SEQ ID NO: 48503 - DNA, 1121 bp, Homo Sapiens
gcagcccctcaagccctcacctggcctgggctctcctttctggcttccctcatctcctgtggagggttcccgcaggaagtgaagcagcagcaggaacctttgggccacctgagcccctcccttctatcctcacccctgcttggcttcttagaagctcctgactctcctcctgacaccacgctgctggcatctcctctcccagcaggctccatggctgcagccagccccatccgcccagcctggggctttgtgtccgggacagagccgtgtcccgtggttaggctgcaccatccgtggcctggccagctctgtctcctttgcacagaatgcttgaaagaacaggacaaagtggctgtgcctgtgggtggggggcaccgtccagccctccatgggctctctgatggccgtacgtgggttggagaacatggtgagaactaaccccgttcaatgctggagtcacctcagcccagaaggtggtaactttgctcactaagcacccagcagagtggcccagggatgtggggtgggcctccccttgggcagtggacaggagggtgagagctcagccaggcagatgggggcaggggagatgtgaggagccccaccttcaccctcaaatggcccacaacagcctcctgtgggccctcttctataatgtttctccacttttttttttaaatttgttgcccagccggagtgcagtggtgtgatcatggctcactgcagcctaaatctcatgggctcaggtgatcttcccactgcttcccaaagtgctgggatcacaggcatgagacactgcagctggctatatcttcaaatttaaacatgatttgcagccaggcgcggtggttcacgtctgtgatcctagcactttgggaggccgagatgggtggatcacctgaggtcaggagttcgagaccagcctgaccaacgtggtaaaaccttgtctctactgaaaatacaaaaaaattagcctaactgggcatggtggcatgcggctataatctcagctacttgagaggctgaagcaggagagtcacttgaacccaggaggcggaaatcgcactctagcccgggcaacaagagctagactctgcctcaaaaaaaaaaaaaaaaaaaaa

SEQ ID NO: 48504 - DNA, 6484 bp, Homo Sapiens
atggggctcccagcgctcgagttcagcgactgctgcctcgatagtccgcacttccgagagacgctcaagtcgcacgaagcagagctggacaagaccaacaaattcatcaaggagctcatcaaggacgggaagtcactcataagcgcgctcaagaatttgtcttcagcgaagcggaagtttgcagattccttaaatgaatttaaatttcagtgcataggagatgcagaaacagatgatgagatgtgtatagcaagatctttgcaggagtttgccactgtcctcaggaatcttgaagatgaacggatacggatgattgagaatgccagcgaggtgctcatcactcccttggagaagtttcgaaaggaacagatcggggctgccaaggaagccaaaaagaagtatgacaaagagacagaaaagtattgtggcatcttagaaaaacacttgaatttgtcttccaaaaagaaagaatctcagcttcaggaggcagacagccaagtggacctggtccggcagcatttctatgaagtatccctggaatatgtcttcaaggtgcaggaagtccaagagagaaagatgtttgagtttgtggagcctctgctggccttcctgcaaggactcttcactttctatcaccatggttacgaactggccaaggatttcggggacttcaagacacagttaaccattagcatacagaacacaagaaatcgctttgaaggcactagatcagaagtggaatcactgatgaaaaagatgaaggagaatccccttgagcacaagaccatcagtccctacaccatggagggatacctctacgtgcaggagaaacgtcactttggaacttcttgggtgaagcactactgtacatatcaacgggattccaaacaaatcaccatggtaccatttgaccaaaagtcaggaggaaaagggggagaagatgaatcagttatcctcaaatcctgcacacggcggaaaacagactccattgagaagaggttttgctttgatgtggaagcagtagacaggccaggggttatcaccatgcaagctttgtcggaagaggaccggaggctctggatggaagccatggatggccgggaacctgtctacaactcgaacaaagacagccagagtgaagggactgcgcagttggacagcattggcttcagcataatcaggaaatgcatccatgctgtggaaaccagagggatcaacgagcaagggctgtatcgaattgtgggtgtcaactccagagtgcagaagttgctgagtgtcctgatggaccccaagactgcttctgagacagaaacagatatctgtgctgaatgggagataaagaccatcactagtgctctgaagacctacctaagaatgcttccaggaccactcatgatgtaccagtttcaaagaagtttcatcaaagcagcaaaactggagaaccaggagtctcgggtctctgaaatccacagccttgttcatcggctcccagagaaaaatcggcagatgttacagctgctcatgaaccacttggcaaatgttgctaacaaccacaagcagaatttgatgacggtggcaaaccttggtgtggtgtttggacccactctgctgaggcctcaggaagaaacagtagcagccatcatggacatcaaatttcagaacattgtcattgagatcctaatagaaaaccacgaaaagatatttaacaccgtgcccgatatgcctctcaccaatgcccagctgcacctgtctcggaagaagagcagtgactccaagcccccgtcctgcagcgagaggcccctgacgctcttccacaccgttcagtcaacagagaaacaggaacaaaggaacagcatcatcaactccagtttggaatctgtctcatcaaatccaaacagcatccttaattccagcagcagcttacagcccaacatgaactccagtgacccagacctggctgtggtcaaacccacccggcccaactcactccccccgaatccaagcccaacttcacccctctcgccatcttggcccatgttctcggcgccatccagccctatgcccacctcatccacgtccagcgactcatcccccgtcaggtctgttgcagggtttgtttggttttctgttgctgccgttgttctctcattggctcggtcctctcttcatgcagtgttcagcctcctcgtcaactttgttccctgccatccaaacctgcacttgctttttgacaggccagaagaagcggtacatgaagactccagcacaccgttccggaaggcaaaagccttgtatgcctgcaaagctgaacatgactcagaactttcgttcacagcaggcacggtcttcgataacgttcacccatctcaggagcctggctggttggaggggactctgaacggaaagactggcctcatccctgagaattacgtggagttcctctaaccgtgggccccagcagaactgctgagctttacatggtatccatgacaactgctgattccagtgtcgaggccatttctctttgccactgagaaatgcagcgtgactgactctgttgctacctgtcaacatgaatgtttctgtgagctctggtgtcactcatctccatgatcatctcagccaacatgcatcagtactgcaagaaaagaagtcaatcagcagaggagagcatttgataactaagaggaagacttgcaaagccgttttctcatgagtaccctgaatagggggcactcattttgtttcaacggtccaaacgcccaaccttcagaaagaggaagtcagatagaaatagtccctgagagcacactgtgtagctaagcctgctggggctgggtgaagaaattggcgctgagatccaggctggatccattgcttttgtttacaataggcactctctctaccccacctctcagtacttgagacttaaagtgctacaggcagctggatctgtttgcatgcaggatgaagagggttaaaacactgtttatataagatccaatctctcaccatctctaaagcagccgttggcctgtcatcagtgagatacaatccagtcttctcatgcacgggaacacacacaccctgcgtttctccctcccaggctaggaacctctctgccaccaagggctgccatccatcgcctagtaaccacggcaacccaacctactctaaaaccaaaccaaaaaaataaaataacacatcctctttgcatgacacattttttttctcccctttttggtacactttttttgaatggttttctaacaacttgaagcacaggatcaaggaattagggtggtctacttgaggcagatgggatagtagctgggaactgttccctttctgattaatttcagcagcatcggaatatatttggagcacaccctagtaacctcttgagattaaattacatagtcttaatatttctgttcctccatgcaactgatgtttgttttttaaagggtaagatgctgcctcccaatgggtgatgccatctgactggtttccccatgtcctcccattcacccatctctgctcccacccttgcctgcctctaacccaccactggccagcccccttgccctactctgggctgctgaacactggtgctgtggtggttttcaaggttaattcctaggctaaccgtatggcctatagtttaaaagcacatctatgttcactgccactctgaaaaagggaattatttctcagtctttcaaggcttgagactaatataggccattgtgattcaggaagaaacccaaggttggagggtgggatgagtaccctctgaaaaagggaatttgctggtgaaaagaggctggatcttgtggaagactgtcttggatggggaagtactacctggagatttcaaattcacttggcctgcaaacaacagagttatccgtatcttccacatgtgaatgtcattgcaagggtgactctagacaaactacaaaccgatggaccgtcaagctccccaggagccccttggatggcagcgttgcttcagagtgtttcctgtttctggaattccttgttagggaactttaaagaagaaaagaaaaacttgaattgtgttgaattactgtatcttttacttttttttttttgaaaagataaacttgtaaatagagtgatttgaaatactatatggcaaagttttatatttgatattctttaagttagttgctcacacacttaggctttgattgctgaagaagtatgtttaagagggagagaggggaggcaaagctgaagagagtcaaggtcactgtccccgcttcggcctgaaggaaagagaagacatttctatggccttgctctctgctgtcctgttggtgggcacgacacatcagtggtgttcagtctttatgtgtttttaagcatcccttgggctttggatttggagatgggaagagcatctccaggcaatgagtttttcaaagaatgcctacttagtagtaagatgaagctcaggatttaaataagtggggtcaggcattcgagtttttgtctttcttctcaggtgtatttcttggtacccccaagatatcaggccagaaagagatgagtcagttgctgtgctctttacttctttttctccacatcttctgaggctttagaaatgtggacaagctagttttcaaattttgtgtgcgtctgtaagttcttaaagaaccagcttcttagaatgttcagttctcaatgtgctgctgctttcccttctcctaaacattttaaaactcttccctttcacctccaattcccgtgatcccaaaagaagaggaagactccaggaggggtatagattgtgccgtcatagctttacaggtggttttaaagttaacaggggtttgtcatggtgattcactactcagtttatcagctcaaggattatacagctcttttccgggaactcacccaggagcaagcgagacactaccattgaatcagggaatgagaattaagaatggacaggaccaagacagaactcaagaaagccactggggaaaactcgagaagaaagggagtatactagtaggttagatctgtgaacctgaggacaagaagaccttgggaaatggaggcctcaggggatgtgcattcacatactattacgcttctcaaagagagaccaacatcatgcttttaacacatttgatgaggttttttatttgtgtttttgtttgttttttgagatggagtctcactctgtggcccaggctggagtgcagtggcgcaatcttggctcactgcaacctccacctcccaggttcaagtgattctcctgtctcagcctcccaagtagctgggactacaggcatgagccatcacacccagctagttttttgtatttttagtaaagatggggttttgccatgtttgccaggctgatctcgaactcctgacctcaagtgatctgcccacttcagacccccaaagtgctgggattccaggtgtgagccgctgcggccgaccacatttgatgtttgaagttgtaatctgtcccatcataaacttacctggagctcatgtggaggaacagaaggccaagatccttgctttgggggtgcctcacgaagcatccctgtagacatttggccccagcttcactgcttggaagcatgtccctccctcttgagttggctctgatttgaaatcgggagaaacagagctgctgccaatgggatcttttaggtaactccctccctagcttccgtgtgtctgtgcagtgcccatgagctgctgccaatgggatctttcaggtaccccctccccagcttccctgtggctgtgcggtgcccttgacagatggcttctctgtttccctttgcccagccaggctcccctccttcctattagctacaaaactggataaacttcagaatatgagccaatgagtaggaaggaacttgaagactaaagattttactctctcccctatccatgccccctacctctgactctctctgtgtgaacaggaaactttagggcagatgaggagaatgaattggttatcagagtggaagaccatggcccaggatccctgagctttcccagtagcctccagtttcctttgtaagacccagggatcacttagccatagcctgaatcttttaggggtattaaggtcagcctctcactcttccttcaggttactaacaaaatttcgtagctaaagaatgccatggccgggtgcagtggctcacgcctataatcccagcactttgggaggccgaggcgggcggatcacgaggtcaggagattgagaccatcctggctacgacggtgaaaccccgtctctactaaaaatacaaaaaattagccgggtgtggtggcgggcgcctgtagtcccagctactctggaggctgaggcaggagaatggcatgaacccaggaggcagagattgcagtgagccaagatcacgcccctgcactccagcctgggtgacagagccagactccgtctcaaagg

SEQ ID NO: 48505 - DNA, 1638 bp, Homo Sapiens
ctgacggtggacgagttcctagcttcgggctttgactctaagtccgaatactctccagaagcggagacgcgggaggcacgcgaggctgcccggagtccggatgagccgggcgggagcccctcggccagccggcgtaaaggccgtgcctctgagcacaaagatcagctctctcggctgaaggacagagacgccgagttctacaagttcctgcaggagaatgaccagagccagctaaacttcagcgactcggacagctctgaggaggaagaggagccagggctgaaggggaagaagaattgtgttcctgtgaccctcgccatggttgagagatggaagcaggcagcaaagcaacgcctcactccaaagctgttccatgaagtggtacaggcgttccgagcagctgtggccaccacccaaggggaccaggaaagtgctgaggccaacaaattccaggtcacggacagtgctgtgttcaatgctctggtcgtgttcaatgctctggtcaccttctgcatcagagaccttactggctgtctccagaagctgctgattggaaaggtggcaaaggacagcagcaggatgctgcagccgtccagcagcctgctctgggggaagctccgtgtggacatcaaggcgtacctgggctcggtcatacagctggtgtcctgtgtggcagagacagtggtgttggcggccgtgctatggcacatcagcgtgctggtgccctgcttcctgaccttccccaagctcaagagaatggtggtcgtatggagcacagggaaggagtccctgcgggtgctggctttcctggtcctcagcagagtctgccggcacaagaaggacactttccttggccccatcctcaagcaaatgtacatcatgtatgtgaggaactgcaagttcacctcgcctggtgccctccccttcatcagttccatgcagcggaccctgacggagctgctggccttggagccgggtgtggcctaccagcacgccttcctctacatccgccagctcgccatacacctgcacaacgccatgaccacccgcaagaaggaaacgtctgtgtacaactggcagtacatgcactgcctcttcctgtggtgccgggtcctgagcactgtgggccccagcgaagccctccagcccttggtctactcccttgcccaggtcatcattggctgtatcaagctcatccccactgcccgcttctacccactgcgaatgcactgcatccgtgccctgacgctgctctcggggagctcgggggccttcatcccagtgctgcctttcatcctggagatgttccagcaggtcgacttcagcaggaagccggggcgcatgagctccaagcccatcaacttctccgtgatcctgaagctgtccaatgtcaacctgcaggagaaggcgtaccaggacggcctggtggagcagctgtacgacctcaccctggagtacctgcacagccaggcacactgcatcggcttcccggagctggcgctgcctgtggtcctgcagctgaagttgttcctccgggagcgcaaggtggccaactactgccggcaggtgcagcagctgctggggaaggttcaggagaactcggaacacatctgcagccgccgccagagggtttccttt

SEQ ID NO: 48506 - DNA, 1995 bp, Homo Sapiens
atgtcgctgcagagaatcgtgcgtgtgtccctggagcatcccaccagcgcggtgtgtgtggctggcgtggagaccctcgtggacatttatgggtcagtgcctgagggcacagaaatgtttgaggtctatgggacgcctggcgtggacatctacatctctcccaacatggagaggggccgggagcgtgcagacaccaggcggtggcgctttgacgcgactttggagatcatcgtggtcatgaactcccccagcaatgacctcaacgacagccatgttcagatttcctaccactccagccatgagcctctgcccctggcctatgcggtgctctacctcacctgtgttgacatctctctggattgcgacctgaactgtgagggaaggcaggacaggaactttgtagacaagcggcagtgggtctgggggcccagtgggtatggcggcatcttgctggtgaactgtgaccgtgatgatccgagctgtgatgtccaggacaattgtgaccagcacgtgcactgcctgcaagacctggaagacatgtctgtcatggtcctgcggacgcagggccctgcagccctctttgatgaccacaaacttgtcctccatacctccagctatgatgccaaacgggcacaggtcttccacatctgcggtcctgaggatgtgtgtgaggcctataggcatgtgctgggccaagataaggtgtcctatgaggtaccccgcttgcatggggatgaggagcgcttcttcgtggaaggcctgtccttccctgatgccggcttcacaggactcatctccttccatgtcactctgctggacgactccaacgaggatttctcggcatcccctatcttcactgacactgtggtgttccgagtggcaccctggatcatgacgcccagcactctgccacccctagaggtgtatgtgtgccgtgtgaggaacaacacgtgttttgtggatgcggtggcagagctggccaggaaggccggctgcaagctgaccatctgcccacaggccgagaaccgcaacgaccgctggatccaggatgagatggagctgggctacgttcaggcgccgcacaagaccctcccggtggtctttgactccccaaggaatggggaactgcaggatttcccttacaaaagaatcctgggtccagattttggttacgtgactcgggaaccacgcgacaggtctgtgagtggcctggactcctttgggaacctggaggtcagccctccagtggtggccaatgggaaagagtaccccctggggaggatcctcattgggggcaacctgcctgggtcaagtggccgcagggtcacccaggtggtgcgggacttcctccatgcccagaaggtgcagccccccgtggagctctttgtggactggttggccgtgggccatgtggatgagtttctgagctttgtccctgcccccgatgggaagggcttccggatgctcctggccagccctggggcctgcttcaagctcttccaggaaaagcagaagtgtggccacgggagggccctcctgttccagggggttgttgatgatgagcaggtcaagaccatctccatcaaccaggtgctctccaataaagacctcatcaactacaataagtttgtgcagagctgcatcgactggaaccgtgaggtgctgaagcgggagctgggcctggcagagtgtgacatcattgacatcccacagctcttcaagaccgagaggaaaaaagcaacggccttcttccctgacttggtgaacatgctggtgctggggaagcacctgggcatccccaagccctttgggcccatcatcaatggctgctgctgcctggaggagaaggtgcggtccctgctggagccgctgggcctccactgcaccttcattgatgacttcactccataccacatgctgcatggggaggtgcactgtggcaccaatgtgtgcagaaagcccttctctttcaagtggtggaacatggtgccctga

SEQ ID NO: 48507 - DNA, 939 bp, Homo Sapiens
atggagccgctcaacagaacagaggtgtccgagttctttctgaaaggattttctggctacccagccctggagcatctgctcttccctctgtgctcagccatgtacctggtgaccctcctggggaacacagccatcatggcggtgagcgtgctagatatccacctgcacacgcccgtgtacttcttcctgggcaacctctctaccctggacatctgctacacgcccacctttgtgcctctgatgctggtccacctcctgtcatcccggaagaccatctcctttgctgtctgtgccatccagatgtgtctgagcctgtccacgggctccacggagtgcctgctactggccatcacggcctatgaccgctacctggccatctgccagccactcaggtaccacgtgctcatgagccaccggctctgcgtgctgctgatgggagctgcctgggtcctctgcctcctcaagtcggtgactgagatggtcatctccatgaggctgcccttctgtggccaccacgtggtcagtcacttcacctgcaagatcctggcagtgctgaagctggcatgcggcaacacgtcggtcagcgaagacttcctgctggcgggctccatcctgctgctgcctgtacccctggcattcatctgcctgtcctacttgctcatcctggccaccatcctgagggtgccctcggccgccaggtgctgcaaagccttctccacctgcttggcacacctggctgtagtgctgcttttctacggcaccatcatcttcatgtacttgaagcccaagagtaaggaagcccacatctctgatgaggtcttcacagtcctctatgccatggtcacgaccatgctgaaccccaccatctacagcctgaggaacaaggaggtgaaggaggccgccaggaaggtgtggggcaggagtcgggcctccaggtga

SEQ ID NO: 48508 - DNA, 939 bp, Homo Sapiens
atgatgggtagaaggaatgacacaaatgtggctgacttcatccttacgggactgtcagactctgaagaggtccagatggctctgtttatgctatttctcctcatatacctaattactatgctggggaatgtggggatgctattgataatccgcctggacctccagcttcacactcccatgtattttttccttactcacctgtcatttattgacctcagttactcaactgtcgtcacacctaaaaccttagcgaacttactgacttccaactatatttccttcacgggctgctttgcccagatgttctgttttgtcttcttgggtactgctgaatgttatcttctctcctcaatggcctatgatcgctatgcagcgatctgcagtcctctacactacacagttattatgcccaaaaggctctgcctcgctctcatcactgggccttatgtgattggctttatggactcctttgtcaatgtggtttccatgagcagattgcatttctgtgactcaaacataattcatcactttttctgtgacacttccccaattttagctctgtcctgcactgacacagacaacactgaaatgctgatattcattatcgctggttccaccctgatggtgtcccttatcacaatatctgcatcctatgtgtccattctctctaccatcctgaaaattaattccacttcaggaaagcagaaagctttctctacttgcgtctctcatctcttgggagtcaccatcttctatggaactatgatttttacttacttaaagccaagaaagtcttattccttgggaagagatcaagtggctcctgtgttttatactattgtgattcccatgctgaatccactcatttatagtcttagaaacagagaagtgaaaaatgctctcattagagtcatgcagagaagacaggactccaggtag

SEQ ID NO: 48509 - DNA, 585 bp, Homo Sapiens
atgaggagcagcctgaccatggtgggaaccctctgggccttcctgtcccttgttactgctgtgaccagttctaccagttacttcctaccttactggctctttggatcccagatggggaagccagtgtcattcagcacattccggaggtgcaactaccctgtgcggggagagggacacagtctgatcatggtggaagaatgtgggcgctatgccagcttcaatgccatcccaagcctggcctggcagatgtgcacagtggtgacaggtgccggctgtgctctgctgctcctggtggcactagctgctgtcctgggttgctgcatggaggagctcatctccagaatgatgggacgttgcatgggagcagcgcagtttgttggagggctgctgataagctcaggctgtgccttataccctttaggatggaatagcccggagataatgcaaacatgtgggaatgtctccaatcaatttcagttaggtacctgtcggcttggctgggcctattactgtgctggaggtggagcagctgcagccatgttgatctgcacctggctctcttgctttgctggaagaaaccccaag

SEQ ID NO: 48510 - DNA, 2087 bp, Homo Sapiens
aaagaatggaggagtcggaacccgaacggaagcgggctcgcaccgacgaggtgcctgccggaggaagccgctccgaggcggaagatgaggacgacgaggactacgtgccctatgtgccgttacggcagcgccggcagctactgctccagaagctgctgcagcgaagacgcaagggagctgcggaggaagagcagcaggacagcggtagtgaaccccggggagatgaggacgacatcccgctaggccctcagtccaacgtcagcctcctggatcagcaccagcaccttaaagagaaggctgaagcgcgcaaagagtctgccaaggagaagcagctgaaggaagaagagaagatcctggagagtgttgccgagggccgagcattgatgtcagtgaaggagatggctaagggcattacgtatgatgaccccatcaaaaccagctggactccaccccgttatgttctgagcatgtctgaagagcgacatgagcgcgtgcggaagaaataccacatcctggtggagggagacggtatcccaccacccatcaagagcttcaaggaaatgaagtttcctgcagccatcctgagaggcctgaagaagaaaggcattcaccacccaacacccattcagatccagggcatccccaccattctatctggccgtgacatgataggcatcgctttcacgggttcaggcaagacactggtgttcacgttgcccgtcatcatgttctgcctggaacaagagaagaggttacccttctcaaagcgcgaggggccctatggactcatcatctgcccctcgcgggagctggcccggcagacccatggcatcctggagtactactgccgcctgctgcaggaggacagctcaccactcctgcgctgcgccctctgcattgggggcatgtccgtgaaagagcagatggagaccatccgacacggtgtacacatgatggtggccaccccggggcgcctcatggatttgctgcagaagaagatggtcagcctagacatctgtcgctacctggccctggacgaggctgaccgcatgatcgacatgggcttcgagggtgacatccgtaccatcttctcctacttcaagggccagcgacagaccctgctcttcagtgccaccatgccgaagaagattcagaactttgctaagagtgcccttgtaaagcctgtgaccatcaatgtggggcgcgctggggctgccagcctggatgtcatccaggaggtagaatatgtgaaggaggaggccaagatggtgtacctgctcgagtgcctgcagaagacacccccgcctgtactcatctttgcagagaagaaggcagacgtggacgccatccacgagtacctgctgctcaagggggttgaggccgtagccatccatgggggcaaagaccaggaggaacggactaaggccatcgaggcattccgggagggcaagaaggatgtcctagtagccacagacgttgcctccaagggcctggacttccctgccatccagcacgtcatcaattatgacatgccagaggagattgagaactatgtacaccggattggccgcaccgggcgctcgggaaacacaggcatcgccactaccttcatcaacaaagcgtgtgatgagtcagtgctgatggacctcaaagcgctgctgctagaagccaagcagaaggtgccgcccgtgctgcaggtgctgcattgcggggatgagtccatgctggacattggaggagagcgcggctgtgccttctgcgggggcctgggtcatcggatcactgactgccccaaactcgaggctatgcagaccaagcaggtcagcaacatcggtcgcaaggactacctggcccacagctccatggacttctgagccgacagtcttcccttctctccaagaggcctcagtccccaagactgccaccagtctacacatacagcagccccctggacagaatcagcatttcagctcagctggcctgggatgggccaggctggtcctggctgcctgttccctgtgctcttcagaattactgtttttgtttccttttaccccagctgccattaaagcccaaacctctagccc

SEQ ID NO: 48511 - DNA, 765 bp, Homo Sapiens
gggaaccacggtggcttcggtggaggtttcggcagtggcatccagggccagggtagcggccatggatggggccagggccgaggccgtggagctcatggaggcaaagctgaggataaggagtggatgcccgtcaccaagctgggccacttggtcaaggacatgaagatcaagtccctggaggagatctatctcttctccctgcccataaaggaatcagagatcattgacttattgactttttcctgggggcctctcaaggatgaggttttgaagattatgccggtgcagaagcagtcccctgcctgccagggcaccaggttcaaggcgtttgttgctgtcggggactacaatggccacttctgtctggatgttaagtgctccaaggaggtggccaccgccatccgtggggccaccatcctggccaagctctccattgtccccgtgcgcagagcctactgggggaacaagatcagcaagccccacaccgtcccttgcaaggttacaggccgctgcagctctgtgctgctgcacctcatccctgcacccaggggcactggcatcgtctccacacctgtgtccaagaagctgcttatgatggctggtatcaatgactgctatacctcagcccgaggctgcactgccaccctgggcaacttcgccaaggccacctttgatgccatttctaagacctacagctacctggcccccgacctctggaaggagacctttaccaagtctccctatcaggaattcactgaccacctc

SEQ ID NO: 48512 - DNA, 1266 bp, Homo Sapiens
atgaagaagcactcggcccgggtggccccgctcagcgcctgcaacagtccggtcctgacccttaccaaagtggaaggggaggagcgcccccgggactccccgggcccggcggaggcccaggcaccggccggggtggaggccggcgggagagcgagtcgccgctgctggacgtgctcccgggcgcaactcaagaagatcttctggggcgtggcggtcgtgctgtgcgtgtgctcctcgtgggcgggctccacgcagctcgccaagctgaccttcaggaagttcgacgcgcccttcaccctcacgtggtttgccaccaactggaactttttattcttcccgttgtactacgtggggcacgtctgcaagtccacagagaagcagtctgtgaagcagcgatacagggaatgctgtcgattttttggagacaatggcttgactttgaaggtgttttttaccaaggcagcaccctttggtgttctttggacactcacaaactacctgtacttacatgcaataaagaaaataaacactacggatgtctccgtgttgttctgctgcaacaaagcttttgtgttcttgctctcatggatcgttctcagggacagattcatgggagtgaggattgtggccgccatcctcgccatcgctggcattgtgatgatgacctacgctgatggcttccacagccactccgtcatcggcatcgcactggtggtggcctcagcatcgatgtctgccctctacaaggttttgttcaagctcctcctgggcagtgctaagtttggagaagccgccttatttttgtccatcttgggtgtgtttaacatcctcttcatcacctgcattcctattatcctctactttaccaaagtggaatactggagctcttttgatgacattccatggggaaacctttgtggattttcagttcttttattgacattcaatattgtattaaattttggaattgccgttacatatcccactctgatgtctcttggaatcgtcctcagcatacctgtgaatgcagtgattgatcactacaccagtcagatcgtcttcaatggggtccgggtcatcgccatcatcatcatcggcctgggttttctcctcctgctcctgccagaggagtgggatgtctggttgatcaagctgctcacccgactcaaagtgaggaagaaggaggagcctgcagagggcgctgccgacctgagctcaggacctcagagcaagaacagaagagcccgcccttccttcgcccgctaa

SEQ ID NO: 48513 - DNA, 600 bp, Homo Sapiens
atgcttgcttgctttccttgttttctgagaagaaagatgccttgcctgttgaaggtggcagatgcaggttgctctgtgggcctcgggaaggttcactgcagctgtcacctgcccaacccacgtgtcctgaggcactgtgacatcttgacaggtgtcctgactcttggccttgacatgtcctgtcacgcctgcctgtcagctgggactgggcttggggaagagcttgtgggcctggggcctggtagtacttgcttaaacatctgtggctgctatttccctgtcacaggctggcaagtcagaactactcagattcacttgcacagcaatcttcagtcttctgattatgtggctctgcaacagggagagggagatattcatgagcaagtgtgcaaaatgcatttaatgcctgctaatggtgtacagccatccattgctttggtctgcccagtgtctgtctccctatcttttgataccaggggccaagtttctctggggaattcctttcagtttttgcagttctgggacagttacccttcacccagcactatgtcaatatgggcacatgactcaagccagccaatcagagttcactttccctag

SEQ ID NO: 48514 - DNA, 1024 bp, Homo Sapiens
acttgagcgggcactcttctgcggcaagcaggtctaggaattcgcctggttcccacctcgcgtcccttgccttccttcctagtctacccactgtagtgccccctgcgtcccgctccctcctagccgactcagagcacaagaaggattgccacggtttccattgcagcagccgtggcgcctctgaccctttttttatatcgcggcgacggcgggctgtcgtcacgacgacgtgcggacgcagcggcgggggcacaggagacaatttatccagcatgttgctagaaaatctaactgataatgaaagtgaaaatactaatcttaagaagaaggtatttgaaaaggaggcccatatccaagaactttcttgtttgtttcagagtgaaaagagcttagaaaccaagatagccaagtggaacctgcaatcaagaatgaataagaatgaggctatagtgatgaaagaagcaagtaggcaaaaaactgtagctttaaaaaaggcatctaaagtttacaaacaaaggcttgaccattttacaggagctattgaaaagcttacttcccaaattagagatcaggaagccaagttgtctgaaacaatttcagcttccaatgcctggaaaagtcattatgagaaaattgtgatagaaaaaaccgaattggaagtacagattgaaacaatgaaaaagcaaatcattaatcttttggaagatctgaagaaaatggaagaccatggaaaaaattcatgtgaagaaattcttagaaaagttcactcaattgaatatgaaaatgaaactctgaatcttgagaatacaaaattaaagactacacttgctgctttgaaggatgaagttgtatctgttgaaaatgaactctcagaattgcaagaagtagaaaaaaaacagaaaacccttattgaaatgtataaaactcaggtacaaaagttgcaagaagcagctgaaatagtaaaaagcagatgtgaaaatttgctacataaaaataaccaaataacaaaaaccaaaaataaaaa

SEQ ID NO: 48515 - DNA, 962 bp, Homo Sapiens
actctcatgtaagtcaacaacatcctgggattgggacacactttctgggcactgctggccagtcccaaaatggaacataaggaagtggttcttctacttcttttatttctgaaatcaggtcaaggagagcccctggatgactatgtgaatacccaggggccttcactgttcagtgtcactaagaagcagctgggggcaggaagcagagaagaatgtgcagcaaaatgtgaagaggacaaagaattcacctgcagggcattccaatatcacagtaaagagcaacaatgtgtgataatggctgaaaacaggaagtcctccataatcattaggatgagagatgcagttttatttgaaaagtaaaggctgcaatcaagatgttggcatggctggggtctcatctgaaggctggactggagaagaatctacttccaaacttatgtggtagttggaagaatttagttcctcaaggctgctaaactgatggcctgtgttccttgcctctgggatggtagcttgcttcaacaaagtgtgcaagcagagaagacagagagagtccgctagcaagatagaagccacaatctcttgtaatctatcatttttgctgtatgctactggttaaaaataactcattaggttagcctactggctctcagggggaagagattatacaaaggcatgaatttctggaggagggaatgagggcaaagaactctgaaaagtttctcttccacaatctgaagaacttctagaaagtagaaggaagcaatattgcttagggatggacaacttggcactggttatgtgttccaagtgaggtaaccttgttcccaggaataaagagaaccagatgactgtaaacatttccctaaactgaaatgcactgttgtatgttcacctgaaatgaatggtgtaagctgaatatgagatttttgacaaaataaaaattttgctgtgttctcaga

SEQ ID NO: 48516 - DNA, 423 bp, Homo Sapiens
atgggaagccacagttgctccagcacaggagacccctccccatcccaggaaacacggaggactgcagtgaggaagccacgagttcgcagcgcgggttggtcttggccttggctgactcgctgtgtgacctggggcgcggcgcccctccggctcgtggtctggcgaggggagtgcgcgcgtgcgcgtgtgtgttggggaagggggcggactagccttctgggtgctcttcctgccccatggggagcacacccatgcttcaggccccccagccctggtcccgggacccgaggaggccactcacctggcgccagggcgctggggctggggacgcacccagcaggggcggctgcagggtgggcgccctcgggacccccgagtgaggccccgggtgaggccgggaagatgtggagctccgagcggtag

SEQ ID NO: 48517 - DNA, 1374 bp, Homo Sapiens
ggtgactcgaagaagccttccaaaaagcatgtgaaaaggaagccctactctactaccaaggtagcctcatcttctctgatagagaatacaagaagatatgctgtgcacaccaaccagtgtaggagacctcatggctcccgggtaaagaagaagaggtacccacaagaagatgacttccatcatacagtcttcagcaaccttgaaagattggacaagcttcagcccactcttgaagcctctgaggagtctctagttcacaaggacagaggagatggagagaggccagtcaacgcgagggtaagggcactgaccttaactctgtgtttttctagcccccatgaggacaccgtacacgacatcactaacgaggacgccacacacgacatcgctaacgaggatactgtacacgacatcgctaacgaggccgccgacaagggcatcgccaacgaggatgccgcccacggcatcgccaacgaggaggacgccgcccagggcatcgccaacgagggcgccgcccagggcatcgccaaagaggacgccgcccagggcatcgctaacgaggccgccgacaagggcatcgccaacgaggatgccgcccacggcatcgccaacgaggacgccgcccacggcatcgccagcgaggacgccgcccacggcatcgccagcgaggacgccgcccacggcatcgccagcgaggacgccgcccagggcatcgccaacgaggacgccatccagggcatcgccaaggagtacgccgtccacggcatcgccaacgaggacgccgcccagggcatcgccaacgaggacgccgcccagggcatcgccaacgaggacgccgcccagggcatcgccaaggaggacgccgcccagggcatcgccaaggaggacgccgcccagggcatcgccaacgagggcgccgcccagggcatcgccaaagaggacgccgcccacggcatcgccaacgaggacgccgcccagggcatcgccaacgaggacgccgcccacggaatcgccagtgaggacgccgcccacggcatcgccagcgaggacgccgtccagggcatcgacaaggaggatgccgcccagggcatcgccaacgaggacgccgcccagggcatcgccaacgaggacgccgcccagggcatcgccaaagaggacgccgcccacggcatcgccaacgagctgtatacgacatcgctaacgaggacaccctacaagccgtcgctaacaagtacactgtacacaacatcgctaatgagggcactgtacaagacatcaccaatgagggcgctttatacgacattgctaatggcaccgacaaggcacgctaacgtggacgctgtacacgacattgctaatgaggacagcgtataa

SEQ ID NO: 48518 - DNA, 1265 bp, Homo Sapiens
agatttgacaaacatgaggagaaacaaagcaaactctcttttctgtgggctaatttgtctctcattttgggtccttcgtatatcagagtgtgaatgatactttattgtcctcacttgtgcttcagttcatggctgttttgcaggaggagctcctaaaaaaaaatgcagtgcttatgggaaaaagcttgtgaaaatctcagaaaccagaacatggaaaccaccagaaccagatgctggaagattatgtgagtttaaggatagaagcaatcagagctgaatatcagaagatgcttgcatttctccgtgaagaagagcaacatcacttggagaggctgcgaaaggagggcgaggatatttttcagcaactcaatgaaagcaaagccagaatggaacattccagggagcttttaagaggaatgtatgaggatctgaagcaaatgtgccataaagcagatgtggagctactccagctgtatctttctccttgcaggtatgagtccctgctgctgcaagtgtctgagcctgtgaatccagagctcagtgcagggcccatcactggacttctggacaggctcagtggattcagagttgattttactctgcggcttgaaagagctaatagtcatatcttcctgtatggagatttgagaagcatgaatgttggatgtgaccctcaagatgatcccgatatcactgcaaaatctgaatgttttcttgtatgggggactcaggctttcacatctggcaaatattattgggaggtgcacgtgggggattcttggaattgggcttttggtgtctgtaacaattattggaaagagaagagacagaatgacaagatagatggagaggagggactctttcttcttggatgtgttaaggaggacactcactgcagtctctttaccaccaccccacttgtggtgcaatatgttccaaaacctaccagcacagtaggattattcctggattgtgaaggtagaatcatgagctttgttgatgttgatcaaagtttcctgatatacatcatccctaattgctccttctcacctcctctcaggcctatcttttgctgtagtcacttctgaccagagaaaagtcagaaatgggtctatatgctctgggaacctgtttagctaagaaagcctttttttcgcacctcatcaaacaggataaataagttatatttaatgtctttagttgcattctaatgtcatcaaaactcatttatagtgtttctattaaatatggtgaaaacactgcaa

SEQ ID NO: 48519 - DNA, 966 bp, Homo Sapiens
atggaaagaaagaatcaaacagctataactgaattcatcatcttgggattctccaacctaaatgaattgcagtttttactattcaccatcttctttctgacttatttctgtactttgggaggaaatatattaattatcttgacgactgtgactgatccacacctgcatacacctatgtattattttctagggaacttggcctttattgacatctgctacaccaccagcaatgtcccccagatgatggtgcacctcctctcaaagaaaaaaagcatttcttatgtggggtgtgtggttcaactttttgcatttgttttctttgtaggatcagagtgtctcctactggcagcaatggcatatgatcgttacattgcaatctgcaatcctttaaggtattcagttattctgagcaaggttctatgcaatcaattagcagcctcatgctgggctgctggtttccttaactcagtggtgcatacagtgttgacattctgcctgcccttctgtggcaacaatcagattaattacttcttctgtgacatcccccctttgctgatcttgtcttgtggaaacacttctgtcaatgagttggcactgctatccactggggtcttcattggttggactcctttcctttgtatcgtactttcctacatttgcataatctccaccatcttgaggatccagtcctcagagggaagacgaaaagccttttctacatgtgcctcccacctggccattgtctttctcttttatggcagcgccatctttacatatgtacggcccatctcaacttactcattaaagaaagataggttggtttcagtgttgtacagtgttgttacccccatgctaaaccctataatttacacattgaggaataaggacatcaaagaagctgtcaaaactatagggagcaagtggcagccaccaatttcctctttggatagtaaactcacttattga

SEQ ID NO: 48520 - DNA, 2626 bp, Homo Sapiens
ctggacctgggcaccgccagccgcctgggcacgggactgggcgggggcgctgacctcggcctaggaggcccaggatcccggagacgcccgcgccctcaggaccctgcgggtcgcacgccctccccagcttctgctgctcgccgctcttcggcagggcgaggtcaggtgcccccttctcgcctctcttctcttctcttctcttcctcctccacttctgtgcccgcggagactccggccgcccccttccgcaggggtgtagtaatctgcggagctgacagcagccccgcagccaccctgcccgaagtctccggaagcggcacgagctcaggccgccgcagccccggcggacccactgttggacctgaggagccagccctcctcccgcacccaaacttggagcacttgacctttggctgttggagggggcaggctcgcgggtggctggacagctgcggagccgcgagggcatcttgcctggagaccgtcggctgcactcccgggctcctggctttgcctctgggatcccgaggtgtccacatcagacgcatgttgactgagacctagagtcatggatgtatgcgtccgtcttgccctgtggctcctctggggactcctcctgcaccagggccagagcctcagccatagtcacagtgagaaggcgacaggaaccagctcgggggccaactctgaggagtccactgcagcagagttttgccgaattgacaagcccctgtgtcacagtgaggatgagaaactcagcttcgaggcagtccgtaacatccacaaactgatggacgatgatgccaatggtgatgtggatgtggaagaaagtgatgagttcctgagggaagacctcaattaccatgacccaacagtgaaacacagcaccttccatggtgaggataagctcatcagcgtggaggacctgtggaaggcatggaagtcatcagaagtatacaattggaccgtggatgaggtggtacagtggctgatcacatatgtggagctgcctcagtatgaggagaccttccggaagctgcagctcagtggccatgccatgccaaggctggctgtcaccaacaccaccatgacagggactgtgctgaagatgacagaccggagtcatcggcagaagctgcagctgaaggctctggatacagtgctctttgggcctcctctcttgactcgccataatcacctcaaggacttcatgctggtggtgtctatcgttattggtgtgggcggctgctggtttgcctatatccagaaccgttactccaaggagcacatgaagaagatgatgaaggacttggaggggttacaccgagctgagcagagtctgcatgaccttcaggaaaggctgcacaaggcccaggaggagcaccgcacagtggaggtggagaaggtccatctggaaaagaagctgcgcgatgagatcaaccttgctaagcaggaagcccagcggctgaaggagctgcgggagggtactgagaatgagcggagccgccaaaaatatgctgaggaggagttggagcaggttcgggaggccttgaggaaagcagagaaggagctagaatctcacagctcatggtatgctccagaggcccttcagaagtggctgcagctgacacatgaggtggaggtgcaatattacaacatcaagaagcaaaatgctgagaagcagctgctggtggccaaggagggggctgagaagataaaaaagaagagaaacacactctttggcaccttccacgtggcccacagctcttccctggatgatgtagatcataaaattctaacagctaagcaagcactgagcgaggtgacagcagcattgcgggagcgcctgcaccgctggcaacagatcgagatcctctgtggcttccagattgtcaacaaccctggcatccactcactggtggctgccctcaacatagaccccagctggatgggcagtacacgccccaaccctgctcacttcatcatgactgacgacgtggatgacatggatgaggagattgtgtctcccttgtccatgcagtcccctagcctgcagagcagtgttcggcagcgcctgacggagccacagcatggcctgggatctcagagggatttgacccattccgattcggagtcctccctccacatgagtgaccgccagcgtgtggcccccaaacctcctcagatgagccgtgctgcagacgaggctctcaatgccatgacttccaatggcagccaccggctgatcgagggggtccacccagggtctctggtggagaaactgcctgacagccctgccctggccaagaaggcattactggcgctgaaccatgggctggacaaggcccacagcctgatggagctgagcccctcagccccacctggtggctctccacatttggattcttcccgttctcacagccccagctccccagacccagacacaccatctccagttggggacagccgagccctgcaagccagccgaaacacacgcattccccacctggctggcaagaaggctgtggctgaggaggataatggctctattggcgaggaaacagactccagcccaggccggaagaagtttcccctcaaaatctttaagaagcctcttaagaagtag

SEQ ID NO: 48521 - DNA, 456 bp, Homo Sapiens
tccggatctgagcctcccgcagaggaatgcagaatgacgccacggcacgcaggatgtgatgtcaccgagatgcagaggatactcagtcaaccaacatttactgagcatctacttcgtgccgtatgtacgaagctagcaaatatgtacagcaccagtactgattgcagggagcactgtagaagaggaatgaaggccaaacaattaaaagcggaggcggggagtacttatgtgatttttttttctgtgataggtcttgtcaacggaaaggggtccctatccagaccccaagagagcattcttggatctcttgcaagaaagaatttgaggcgaatccatagagtaagcttagtgatgtgtgtcagacctctgagcccaagcaaagccatcatatcccctgtgacctgcatgtatacatccagatggcctgaagcaagtgaagaatcacaaaagaagtga

SEQ ID NO: 48522 - DNA, 2767 bp, Homo Sapiens
atgccacgcaattctggagctggatacggctgcccacacggggaccccagcatgctggacagcagagagaccccacaggagagccggcaggacatgattgtgaggaccacccaagaaaaattgaaaaccagctcactgactgacaggcagccactctccaaagagtccctgaaccatgctctcgagctctcagtgccagagaaggtgaataatgcccagtgggatgctccagaggaggcgctgtggacgactcgggccgatgggcgggtgcgcctgcgcatagaccccagctgcccacagcttccctacactgtgcatcggatgttctacgaggccctggataagtatggggacctcatcgctttgggcttcaagcgccaggacaagtgggaacacatctcctactcccaatactacctgctcgcccgcagagccgccaagggcttcctgaagctcggcctgaagcaggcccacagtgtggccatcctcggcttcaactccccggagtggttcttctcggcagtgggcacagtatttgcaggtggcatcgtcactggcatctacaccaccagctccccagaggcctgccagtacatcgcttatgactgctgcgccaatgtcatcatggtcgacacgcagaagcagctggaaaagatcctgaagatctggaaacagttgccacatctaaaggcagtcgtgatatataaagaacctcctccaaacaagatggccaatgtgtacacgatggaggaattcatggagctggggaatgaagtgcctgaggaagccctggacgccatcattgacacccagcagcccaaccagtgctgtgtgctagtctacacttccggcaccactgggaaccccaagggcgtgatgctgagtcaagacaatatcacgtggacggcacggtacggcagccaggccggtgacatccggccggcagaagtccagcaggaggtggtagtcagctacctgcccctcagccatattgccgcccagatctacgacctgtggacaggcatccagtggggggcccaggtttgctttgccgaacccgacgccctgaaggggagcctggtgaacacgctgcgggaggtggagcccacatcacacatgggggtgccccgggtatgggagaagatcatggagcgcatccaggaggtggcggctcagtctggcttcatccggcgaaagatgctgctgtgggccatgtcggtgaccttggagcagaacctcacctgccccggcagcgacctgaagcccttcacaaccagactggcagattacctggtgctagccaaggttcgccaggcactgggatttgccaagtgtcaaaagaacttctatggagcggcccccatgatggcagagacacagcacttcttcctgggtctcaacatccgcttgtatgcgggctacggcctcagtgagacctcaggcccccacttcatgtccagtccctacaactaccggctgtacagctcaggcaagttggtgcccggctgtcgggtgaagctggtgaaccaggacgcagagggcattggcgagatctgcctgtggggccgcaccatattcatgggctacctgaacatggaggacaagacttgtgaggccatcgacgaggaaggctggctgcacacgggtgatgctggccgcctggacgccgatggcttcctctacatcactgggcgcctcaaagaattaatcatcacagctggtggggagaatgtgccccctgtgcccatcgaggaggccgtgaagatggagctgcccatcatcagcaacgccatgctcattggggaccagaggaagttcctgtccatgctgctcaccttgaagtgcactctggacccagacacctctgaccagactgataatctgactgaacaagctatggagttctgccagagggtgggcagcagagccaccacagtgtccgagatcatagagaagaaggatgaggccgtgtaccaggccatcgaagaggggatccggagggtcaacatgaacgcggcggcccggccctaccacatccagaagtgggccattctcgagagagacttctccatttcgggtggagagttgggtcccacgatgaaactgaaacggctcacagttttggagaagtacaaaggtatcattgactccttttaccaagagcaaaaaatgtaatcagggcctatgcctgcagtttctatagaatagagggcaggcgttccgagcctcttcctgagccccaggtctcttcagtctgggcacaggcatttctgccaagtctgttagatctccaggtcagggcacagcactggctctacatttaccaggtcttacgccaacaatagctgacaattccaagaagcttcacgtgtgggtagttttaattcagtttaagtattgctttttgttcaggtgacaaatgagatcagctctccttccagaacgaaagggctgataatttttggccttagttccaggtagattaaaaagctgctagctcacatacaggacagccagcagtaggctgtggagcgggtaggagagagatggctgatactgctcacgtgcgctgcaggaaaagcaatcagtcacaactcacctagcgacctgacttactctggaatcttggcgggcatcgccgaccctattattccattaccaggcactccgccacccacatgccaactgacttgatgcttaataaaactgctgctgcctgtttgattctatttaatgtataatttgaatattaaaccttttaacagaa

SEQ ID NO: 48523 - DNA, 491 bp, Homo Sapiens
ggcacagagagattcacgcaccctcaagagtgtgggtgagacatatacagcctgttagacctgaaggcagatggctcttcttaaggccaataaggatctcatttccgcaggattgaaggagttcagcgttctgctgaatcagcaggtcttcaatgatcctctcgtctctgaagaagacatggtgactgtggtggaggactggatgaacttctacatcaactattacaggcagcaggtgacaggggagccccaagagcgagacaaggctctgcaggagcttcggcaagagctgaacactctggccaaccctttcctggccaagtacagggacttcctgaagtctcatgagctcccgagtcacccaccgccctcctcctagctcagggacccagcccctcctctctgagaaactctgaccttcatgtccttaggctgtgctcctgccactctaccctgacacctcaataaagaccagtgctggttttgttgga

SEQ ID NO: 48524 - DNA, 408 bp, Homo Sapiens
atgaccggcacatcatctcaggcagcgaggaccacaccctggtggtggtggaccgccgagccaacagcgtcctgcagcgtctgcagctggactcctacctgctctgcatgtcctaccaggaaccccagctctgggctggtgacaaccagggcctgctgcacgtcttcgccaaccgcaacggctgcttccagcttatccggtcctttgatgtgggccacagctttcccatcactgggatccagtactccgtgggagccttgtacaccacatccactgacaagaccatccgggtgcacgtgcccacagacccaccaaggaccatttgcacccgaaggcatgacaatgggctcaatagggtctgtgctgagggcaacctggtggtggccggctctggagacctgtcgctag

SEQ ID NO: 48525 - DNA, 687 bp, Homo Sapiens
atgtgcggcccgcggcggctcgcagctcccggcagcagcctcggcagcttcggccgcgcctcgagaggcggccgcagaggctccagcggcggccgagcggccgagcccgggctgggagacaccatgcgccgcgtccttcggctgctcctcggttgcttcctcaccgagctgtgcgcccgcgtgtgccgggcgcaggagcgagcgggacacgggcagctggcgcaactgggcggcgtgttgctgctggcggggggcaaccgctccggggccgcctccggagaggccagcgagggcgctgaggcatcggacgcgcccccgacccgggcgcccacgccggacttctgccggggctacttcgatgtcatgggccagtgggacccgccgttcaactgcagctcgggcgacttcatcttctgctgcgggacttgtggcttccggttctgctgcacgtttaagaagcggcgactgaaccaaagcacctgcaccaactacgacacgccgctctggctcaacaccggcaagccccccgcccgcaaggacgaccccttgcacgaccccaccaaggacaagaccaacctgatcgtctacatcatctgcggggtggtggccgtcatggtgctcgtgggcatcttcaccaagctggggctggagaaagcgcaccggccccaaagggagcacatgtccagg

SEQ ID NO: 48526 - DNA, 1311 bp, Homo Sapiens
ggtaacatggacagcttcatggcgcaagtcaagagcctggcgcagtccctgtacccctgctccgcgcagcagctcaacgaggacctgcgcctgcacctcctactcaacacctcggtgacctgcaacgacggcagccccgccggctactacctgaaggagtccaggggcagccggcggtggctcctcttcctggaagccgtctggtactgcttcaaccgcgagaactgcgactccagatacgacaccatgcggcgcctcatgagctcccgggactggccgcgcactcgcacaggcacagggatcctgtcctcacagccggaggagaacccctactggtggaacgcaaacatggtcttcatcccctactgctccagtgatgtttggagcggggcttcatccaagtctgagaagaacgagtacgccttcatgggcgccctcatcatccaggaggtggtgcgggagcttctgggcagagggctgagcggggccaaggtgctgctgctggccgggagcagcgcggggggcaccggggtgctcctgaatgtggaccgtgtggctgagcagctggagaagctgggctacccagccatccaggtgcgaggcctggctgactccggctggttcctggacaacaagcagtatcgccacacagactgcgtcgacacgatcacgtgcgcgcccacggaggccatccgccgtggcatcaggtactggaacggggtggtcccggagcgctgccgacgccagttccaggagggcgaggagtggaactgcttctttggctacaaggtctacccgaccctgcgctgccctgtgttcgtggtgcagtggctgtttgacgaggcacagctgacggtggacaacgtgcacctgacggggcagccggtgcaggagggcctgcggctgtacatccagaacctcggccgcgagctgcgccacacactcaaggacgtgccggccagctttgcccccgcctgcctctcccatgagatcatcatccggagccactggacggatgtccagttgaaggggacgtcgctgccccgagcactgcactgctgggacaggagcctccatgacagccacaaggccagcaagacccccctcaagggctgccccgtccacctggtggacagctgcccctggccccactgcaacccctcatgccccaccgtccgagaccagttcacggggcaagagatgaacgtggcccagttcctcatgcacatgggcttcgacatgcagacggtggcccagccgcagggactggagcccagtgagctgctggggatgctgagcaacggaagctag

SEQ ID NO: 48527 - DNA, 2165 bp, Homo Sapiens
taaagtctggagggtgctgaggcagcagggggctggtgtattagcactgccctgagcgtgtgcacacctggccaggctgcaacagtgcccaggctcgccctgactttactctgagatcaaagtggacactgacagcagggagaagccaggcagcagaagcaggcacttccaaacctgcgaaggccggggatggggcttcctgggccccctagagtgcagagatgcctgggtctgcagccatggtttgggtggctgtagctgcgcctaggagaggggcttctctctgctcccggcttccaggagcacagggatgcctgggtctgcagccatgacttgggcagctgcatctgtgcccagaggggtggggctcctgcctgctccatggagcagaaggcctggatctgcagctgggacttgggtggggcttctgcctgctctgtggagcaggaggtctgggtctacagctgtgacttcagtggctgcagctgtgcccaggagagtggggcacccatctgctcccggcccgagagcacagggatgcctaagtctgcagagagctaccacccaactcggaaggggcagggctcctgcttgtccgcagctcctgccagttccatggagcatgcagccctggctgtgcctccctgctgcagctggcatgatggcaccagccactttagatggaccgtggtgtcatcactgagaccctgtcttgacacagctgtcaggacactctctagccacacttgccttcctgctgccagtgccgccgtggctcaggtggctgcagttccttgagatgtcccagtgggtcctgggtgagcccatccagctgatgggccatgaggcaacaggcaagtggacaggccagcactgtcccccttcctcttcttctgccccttcaactgcaggctggaaaattcatatgttaccaggaaaacagccggctacccagggctatttacctcaggggccaagcttcccgtgggatgagatcgttgggctcagagaacgtgttgagcaaacacagtactttctgtgagctgggttaggcttgtacagactccagagtcccaaatatggcttcatccacagtgtcggagcagcagcgagggctctaagaccacccagctctcttcctggctattttttccatgctactcatcccaaaacttgatctcacattgctctgtttctttctctgcctccatgcttgatgcatttacttaatctttcgcaggatgggtcattactttttgcaatagcacactcaaaggtaatgaccaagataaattgaaaagaggattcaacagtattcattgtaagattgaatgggatataaaatacgtaatcagcacttgtgaggaatatcactagattctcttcttcctactccccctccttttttttttttttttttttttgcattaaaacccgggaatttgatgttgattgtggcctaaatgttaagcatattctggattttctacaccgttctgacaccacaggtacttgtttctttctcagaaggcaggtgaagctcagctgtgtggggctgtgcttggtggcagtgtgggaaacgtgtggaactcaccatggtgttagcagcttttactagccgtttgcttggaaaacagtctccgatctgcacttgcacacccaccacgatgccttctccccatggctctgtggacaccaggaggtcagggcacagaggacgtgcgacttgtgctcctgtcttgctgcacagtctaaagacctcacgtacgttttgaatgttcaaccactattagagtgagaaatggcatccaagatgcttttactgaggaacattgacaactggaaaacaaatcaagcttggattccagggaacactgtccagatttcctgttttatgaattttaccattcactcttaaggctgttaggtttgaataacttgataaatgatcaagagaaaaccatgcagcattatgttcactgccaagtaatatggacgtagaggatggcagaattctgtaaaaccacttctggagttcaacatttaaccgagcacattttacttacctgttaccagtgtgtcgcttggaatgtcttctattaggcatttctcctcacgttcccctgcgtggaaataaaaggcagttgaaaatggaaaaccaaaac

SEQ ID NO: 48528 - DNA, 1632 bp, Homo Sapiens
atgggggactggaacttattgggtggcatcctagaggaagttcactcccactcaaccatagtggggaaaatctggctgaccatcctcttcatcttccgaatgctggtacttcgtgtggctgctgaggatgtctgggatgatgaacagtcagcatttgcctgcaacacccggcagccaggttgcaacaatatctgttatgatgatgcattccctatctctttgatcaggttctgggttttacagatcatctttgtgtcttctccttctttggtctatatgggccatgcactttataggctcagggcctttgagaaagacaggcagaggaaaaagtcacaccttagagcccagatggagaatccagatcttgacttggaggagcagcaaagaatagatagggaactgaggaggttagaggagcagaagaggatccataaagtccctctgaaaggatgtctgctgcgtacttatgtcttacacatcttgaccagatctgtgctggaagtaggattcatgataggccaatatattctctatgggtttcaaatgcaccccctttacaaatgcactcaacctccttgccccaatgcggtggattgctttgtatccaggcccactgagaagacaattttcatgctttttatgcacagcattgcagccatttccttgttactcaatatactggaaatatttcatctaggcatcagaaaaattatgaggacactttataagaaatccagcagtgagggcattgaggatgaaacaggccctccattccatttgaagaaatattctgtggcccagcagtgtatgatttgctcttcattgcctgaaagaatctctccacttcaagctaacaatcaacagcaagtcattcgagttaatgtgccaaagtctaaaaccatgtggcaaatcccacagccaaggcaacttgaagtagacccttccaatgggaaaaaggactggtctgagaaggatcagcatagcggacagctccatgttcacagcccgtgtccctgggctggcagtgctggaaatcagcacctgggacagcaatcagaccattcctcatttggcctgcagaatacaatgtctcagtcctggctaggtacaactacggctcctagaaactgtccatcctttgcagtaggaacctgggagcagtcccaggacccagaaccctcaggtgagcctctcacagatcttcatagtcactgcagagacagtgaaggcagcatgagagagagtggggtctggatagacagatctcgcccaggcagtcgcaaggccagctttctgtccagattgttgtctgaaaagcgacatctgcacagtgactcaggaagctctggttctcggaatagctcctgcttggattttcctcactgggaaaacagcccctcacctctgccttcagtcactgggcacagaacatcaatggtaagacaggcagccctaccgatcatggaactatcacaagagctgttccattctggatgctttctttttcctttctttcttcctggggtgtgtatgtatgtttgtgttgacagagaggcagatggagggggagattatttatggagagataaaattattcattcgatacattcagttaaattcaattcataa

SEQ ID NO: 48529 - DNA, 474 bp, Homo Sapiens
aacacaaagggaaagaagagaggcacccgacacatgttctctaggtcttttagaaaacagagctttgttcctttggccacatacaagcaaatctataagaaaggccatattatagacatcaaggaaatgggtactgttcagaaaggaaggccctacaagtgttaccatggcaatactggaagaacctacaatgccacccagcgtgttgttggcattattataaataaacaagttaaggccaagattcttgccaagagaaccaatgtgcatattgagcacattaagcactctgagagccaagatagcttcttgaagcatgtgaagaaaaatggtcagaaaaacaaggaagccaaagagaaagttacctggattcagctgaagtgccagcctgctccaagagaagcacactttgtgagaaccaatgagaaggagcctgagctgctagaacctctttcttatggattcatggcataa

SEQ ID NO: 48530 - DNA, 1629 bp, Homo Sapiens
acctcgcggactgctgtggcggcagctggagcggcggccgcggtggcagaaccgggggcggccgctgcagtctggagccccatagtgcggggccgcggccaggccacaggaagagctcgaggcccgggccgcaccggctgagtgtgcgggcccgcgcggctcggagccgccgccgcccatcgagcccctccgggcgcgggtcggcccgccatggggtccctgttccggagcgagaccatgtgcctggcgcagctcttcctgcagtcgggcacggcctacgagtgcctcagcgccctgggcgagaaaggcctggtccagttccgagacctcaaccagaacgtaagttctttccaaagaaaatttgttggtgaggtgaagaggtgtgaagagctagagcgaatattggtgtatttggtacaggaaattaatagagctgatattccccttcctgaaggagaggccagccctcctgcgccacccctgaaacaggttctagaaatgcaggagcagttgcagaagctcgaggttgaactgagagaagtcactaagaacaaggagaaactgaggaaaaacttgctggaactgatagagtacactcacatgctgagagtgacaaagacctttgtgaaacgcaatgttgagtttgaacccacttatgaagaattcccttccttagagagtgattctttgttggattacagctgtatgcagaggctgggagcaaaactgggatttgtgtctggcctaattaaccaaggaaaagtggaagcatttgaaaaaatgttgtggagagtctgcaaagggtacaccatcgtgtcctatgcagaactggatgaatcccttgaagaccctgaaacaggggaagtcataaaatggtatgtctttttaatatccttttggggagagcagattggccacaaggttaagaagatatgtgattgctaccactgccacgtgtacccctatccaaacacagccgaggagcggagggagatccaggaggggctgaacacccgcatccaggatctctacactgtactgcacaaaaccgaggactatttgaggcaagtgctatgtaaagccgccgagtctgtctacagccgtgtgatccaggtgaagaaaatgaaggccatctatcacatgctgaacatgtgcagctttgacgtgaccaacaagtgcctcattgctgaggtctggtgtcccgaggcggatctgcaggacctgcgccgggcactggaggagggctcggtaaggctgccttcctctcctctgccaggaacagaagagagactgatggaactgataaattcagagaaaaaaaggaagtgagaatttcatagagtaatgagaatgcagtgtgttgactcttcttttgtttttttaaaatattaattaacaaaattaaaatagagatggggttttgctgtgttgcccaggctggtctcaaactcctggccccgagcgatcctcctgcctcagcctcccaaaccttggctctgtttttgaactgaaattatggtgagctggtcattcaaagctgtatgtgagtacatgtgtttttaaattgctcttttgagtaattcattcacatggtgtaaaagtgaaaagaaataaaagagtatgaaagac

SEQ ID NO: 48531 - DNA, 701 bp, Homo Sapiens
cacaaactgggaggaaaactgagacctcctggtcacccgccgccgggccttttagaaactcccacaagctctgccttccctccctggtcctcttcagaccccctcttagttcttcgcggctaacggctcgcgctcggggccgggtgtggagctggaacagagggctggcaaggcgcgcatgcgcaccgagggtggagccgctgagcacagaaccggaaacttagagacaaagttcggagccccgcccccgccgcgcgccgctgagttgtctggccccgccgacccacggcccacgacccaccgacccacgaatcggcccggccgtcgcgtgcaccatgtctggctcctccagcgtcgccgctatgaagaaagtggttcaacagctccggctggaggccggactcaaccgcgtaaaagtttcccaggcagctgcagacttgaaacagttctgtctgcagaatgctcaacatgaccctctgctgactggagtatcttcaagtacaaatcccttcagaccccagaaagtctgttcctttttgtagtaaaatgaatctttcaaaggtttcccaaaccactccttatgatccagtgaatattcaagagagctacatttgaagcctgtacaaaagcttatccctgtaacacatgtgccataatatacaaacttctactttcgtcagtccttaacatctacctctctg

SEQ ID NO: 48532 - DNA, 1974 bp, Homo Sapiens
atgaagtgtccgatgctaaggtcaaggctgggccaggaaagcgtccactgtgggcccatgttcatccaggtctcccggcccctgcccctgtggagggacaatagacagactccatggctgctgtcccttcgaggggagctggtggcttctcttgaagacgccagcctgatgggactgtatgtggacatgaatgccaccactgtcaccgtccaaagcccgagacaaggccttcttcagaggtgggaggtcagtggtgggcagcaggctctgccaggagtgtcattccagccagagtcggaggtcttagttcacatccccaagcagagactgggtctagtcaaaagaggttcctacattgaggaaaccctgagcctcagattcctccgagtccaccagtccaacatctttatggtgactgagaacaaggactttgtggtggtcagcattccggcggccggggtgctccaggtccagcgatgccaagaagtcggaggaaccccgggaacacaagctttctatagggtagacctgagcctggaatttgccgagatggctgccccggtcctctggacagtggagagcttcttccagtgtgtgggttcaggaacagagtcgcctgcctcaactgctgcactgaggaccactccctccccaccatccccaggaccagagacccctccagcgggagtgccacctgctgcttcctcccaggtgtgggctgcaggaccagctgcccaggaatggctttctcgggacctcctgcaccggccttccgacgcactggccaaagcacaagggcttggaccattcctgcaaacagccaaaccggcgagaagaggccagacatctgcctccattctccccagagtggtgcaagctcagcgaggtccccagcctcccccaggggaagcagggatccctggacaccccacacctccagccacgctcccctcggagcctgtagagggtgtccaggctagtccctggcggccacgtccagtcttgccaacgcacccggctctgaccctgcccgtgtcctcagatgcctcctctccttcaccgccagccccgaggcctgaacgacctgaatcacttctggtctcaggaccatctgtcaccctgactgaaggtctaggaactgtgaggcctgaacaggaccccgccaagtctccaggaagtcccctcctgctgagaggcttgtcaagcggggatgtggctgcacctgagcccatcatgggggagcccggccaagccagtgaggagttccagccattggcgaggccctggcgggccacactggctgcagaggagctggtttctcaccgttctcccggagagccccaggaaacgtgctctggaacggaggtggagaggccacgccagacagggcctggtctccccagggagggggccagggggcacatggacctttcatcctcagaaccaagccaggacatagaggggccgggactctccatcctgccagcgagggatgccacattctccaccccaagtgtgaggcagccagaccccagtgcctggctgagttcaggacctgaactcaccgggatgcccagggtgaggctggcagcgcccctggcagttcttcctatggaacctctgccaccagaacctgttcgcccagcagctcttctgacacccgaagcctcatctgtgggagggccagaccaggcccgatacctggagtcagcccctggctggcctgtgggccaggaggagtggggggttgcacacacgtccagccctccatccacgcaaaccctgagcctgtgggctcccacaggagtgttgctacccagcctggtggagcttgaataccccttccaggctggccggggggcctcactccagcaggagctgacagagcccaccttggccctcagtgctgaaagccacaggcctcctgagcttcaagacagtgtggaggggctttctgagaggccctcacgctga

SEQ ID NO: 48533 - DNA, 1744 bp, Homo Sapiens
aagatgttccagtcaggattcaatccttgatacacagcaaagcattcctatggtaaaaaggccccataactgtaattcacatggagaagatgccacacaaaattctgagttaattaaaactcaaagaatgtttgtaggaaagaagatctatgaatgtaatcagtgcagcaaaaccttcagtcagagctcatcccttcttaagcaccagaggattcatactggggagaaaccctataagtgtaatgtatgtgggaaacacttcattgaacgatcctcccttactgtacatcaaagaattcatactggagagaaaccctataaatgtaatgaatgtgggaaagcctttagtcagagcatgaatcttactgtccatcaacgaactcacaccggagagaaaccctatcagtgtaaagagtgtggcaaagccttccataagaattcatctcttattcagcatgaaaggattcatactggagagaaaccctacaaatgtaatgaatgtggtaaagcttttacccaaagcatgaatttgacagttcatcagagaactcatacaggagaaaaaccctatgaatgtaatgaatgtggaaaagccttcagtcaaagcatgcatcttattgtacatcagagaagccatactggagaaaaaccctatgagtgtagtcaatgtggaaaagcctttagtaagagctcaactcttaccctacatcagcgaaatcacactggagaaaaaccttacaaatgtaacaaatgcgggaaatcctttagccaaagtacatatcttatagaacatcagagacttcattctggagtaaaaccttttgaatgtaacgagtgtggaaaagctttcagtaagaattcatctctaactcaacatcggagaattcacactggagagaaaccttatgagtgtatggtgtgtggaaaacatttcactggacgatcatcccttaccgtgcatcaggtcattcacactggagagaaaccttatgagtgcaatgaatgtggaaaggcattcagccagagtgcttaccttattgaacatcaaagaattcatactggtgagaaaccctatgaatgtgatcagtgtggaaaagccttcattaagaattcatcccttacagtgcatcagagaactcatacaggagagaaaccctatcagtgtaatgaatgcggaaaagccttcagccggagtacaaaccttacacgacatcaaagaactcatacgtgaggaatgttttcactggcccttacctcatgattaactcttcagtaataatcatatgagacatacaatgtagaaacctaataaatgtaatgattgtgggaatctttcagttgaagtacaatatgtcatatcagataataccactgcagagaatccatctaaaagtagagaaatcttgattcagaatgtataatttcctttatatcagaaggtttaaatagctaatataaacaatgaagagtcatgctgaagataagttctgttatatcataccgcacattctcctttggctatcagagactttacactggagagaaaaatgtgagagtgtttaactggacagcccagagacctggtatgtagtcctaatctgccactgccttggacaacttgcctacttccaccaggttatggttctttatttggtaaatgaatgattttggagttagaaatcttgtaggagctctgttagctctaaaatgctacaactctataaatataatgaatgctgggaaa

SEQ ID NO: 48534 - DNA, 1084 bp, Homo Sapiens
atgtatattagatatagataaacaggttgttgggggtagaaaagtttggatatcagatcagaaaagtttggatatctcagctcagagccacgatgagagtggggagggagcccgcgcttctcaagctcaaatgcctaggagtcctttggagatggcgttcagatgcagattcttgttccatagatctggctggagcccaaagttctgcagctggcgggctgattcagaaaacatgagttggtgcttttcctctttttgccgccgtactccattgagagtcttagtcatggagggaaacccgaaaaccaccggtgtccgggacagatactctgacgcattctcccggaacaccctggggactgcgagaaagcccctgctggctcactcgtttgctgggatcagttcccatcaggcatgcggctgtgcttcttggtatcgatttgcttcttggtcccatggcttctgcagcccacgtcgggagggcaaggtgtggtgcagcctgagagaagcatgctcctttgcaggaaggagagggaggcgcacaggcgggccttttggagcagaggaggcagaggagtccaagctgggtgcagttcctctgctgcagccctgagctgggcagacaggacacttcgctggcctttcctggcctcatacttgtcactcggtgacactgcgaccagtgtgagcaaacgttcagaaagcacatttaaacactgttacttaaaattgcaacttcacagggccagtattctttttaccatgttccaaatgaggaaaccggggtgctgaatgattaagtgacttatccaagaccacagggcttgcaaatggcaagtgggaggattgtttgagcccaggaatctgagaccagcctgagcaacatgatgagaccccatctctacaaaaaattaaaacattagctgggtgtggtggcgcatacctgtggttccagctacttgggaggctcaggcaggaggattgcttgagcccagtaggtcgaggctgcagtgagctgtgattgtgccactgcactccagcctgggccacagaacaagacttcatctcagaaaaaaaaaaaaaa

SEQ ID NO: 48535 - DNA, 1177 bp, Homo Sapiens
gcccagcagcccagccacagaggagccagcgaacctctcccggcgcctgtgctgggggctttctgttccagcgtcaaggatggaggagggggagaggagccccttactgtcccaggaaactgcaggccagaagcccctctctgtgcacaggccacccacctcaggctgcctaggtccagtgcccagggaggaccaggcggaggcctggggctgcagctgctgtcccccggagaccaagcaccaggccttgagtggcacccccaagaaaggaccagccccttccctctccccagggagcagctgcgtcaagtatctgatcttcctctccaacttccccttctccctgctggggctgctggccctggccatcgggctctggggcctggctgtcaaggggtctctgggaagtgatctgggggggcccctgcccgcagaccccatgctggggctggcactgggagggctggtggtcagcgcagtgagcctggctggctacctgggcgccctctgtgagaacacctgcctgttacgtggcttctctgggggcatccttgccttcctggtgcttgaggccgtggcgggggccctggtggtggccctctggggcccgctgcaagacagcctggagcacaccctgcgtgtggccatcgcccactaccaggacgacccagacctgcgcttcctcctcgaccaagtccagctcgggctgaggtgctgcggagctgcctcctaccaggactggcagcagaacctaactgacgattccatgcgccttgcaggtactttaactaactgcagctcccccggggtgcaggcctgcagccttcccgcctcctgctgcatcgacccccgcgaagatggagcctctgtcaacgaccagtgcggcttcggggtcctgcgcctggatgcggacgcagctcagagagtggtgtacctggagggctgcggcccgccgctccggcggtggctgcgcgcgaacctggctgcctcgggcggctacgcaatcgcggtggtgctgctgcagggcgcggagctcctgctggccgcccggctactcggggccctcgctgcccgcaggggggcggcgtacggccccggagcgcgcggggaggaccgcgctggcccccagagccccagccccggcgccccgcccgctgccaagcccgcccggggctga

SEQ ID NO: 48536 - DNA, 3450 bp, Homo Sapiens
atttcgccgggttgcttttgtcttgcgggctcctgtcgggttcggtgtttccgctctgaagactgcgacgcgggctccgatgcagctcgctccctgccggatgggtcatgggattctaaacatgaggcagatagctgatcagcttccttgggttttgctgatgacacaagagagctttgcctgaagatggaaacactggagtcagaactgacctgccctatttgtctggagctctttgaggaccctcttctactgccctgcgcacacagcctctgcttcaactgcgcccaccgcatcctagtatcacactgtgccaccaacgagtctgtggagtccatcaccgccttccagtgccccacctgccggcatgtcatcaccctcagccagcgaggtctagacgggctcaagcgcaacgtcaccctacagaacatcatcgacaggttccagaaagcatcagtgagcgggcccaactctcccagcgagacccgtcgggagcgggcctttgacgccaacaccatgacctccgccgagaaggtcctctgccagttttgtgaccaggatcctgcccaggacgctgtgaagacctgtgtcacttgtgaagtatcctactgtgacgagtgcctgaaagccactcacccgaataagaagccctttacaggccatcgtctgattgagccaattccggactctcacatccgggggctgatgtgcttggagcatgaggatgagaaggtgaatatgtactgtgtgaccgatgaccagttaatctgtgccttgtgtaaactggttgggcggcaccgcgatcatcaggtggcagctttgagtgagcgctatgacaaattgaagcaaaacttagagagtaacctcaccaaccttattaagaggaacacagaactggagacccttttggctaaactcatccaaacctgtcaacatgttgaagtcaatgcatcacgtcaagaagccaaattgacagaggagtgtgatcttctcattgagatcattcagcaaagacgacagattattggaaccaagatcaaagaagggaaggtgatgaggcttcgcaaactggctcagcagattgcaaactgcaaacagtgcattgagcggtcagcatcactcatctcccaagcggaacactctctgaaggagaatgatcatgcgcgtttcctacagactgctaagaatatcaccgagagagtctccatggcaactgcatcctcccaggttctaattcctgaaatcaacctcaatgacacatttgacacctttgccttagatttttcccgagagaagaaactgctagaatgtctggattaccttacagctcccaaccctcccacaattagagaagagctctgcacagcttcatatgacaccatcactgtgcattggacctccgatgatgagttcagcgtggtctcctacgagctccagtacaccatattcaccggacaagccaacgtcgttagtctgtgtaattcggctgatagctggatgatagtacccaacatcaagcagaaccactacacggtgcacggtctgcagagcggcaccaagtacatcttcatggtcaaggccatcaaccaggcgggcagccgcagcagtgagcctgggaagttgaagacaaacagccaaccatttaaactggatcccaaatctgctcatcgaaaactgaaggtgtcccatgataacttgacagtagaacgtgatgagtcatcatccaagaagagtcacacacctgaacgcttcaccagccaggggagctatggagtagctggaaatgtgtttattgatagtggccggcattattgggaagtggtcataagtggaagcacatggtatgccattggtcttgcttacaaatcagccccgaagcatgaatggattgggaagaactctgcttcctgggcgctctgccgctgcaacaataactgggtggtgagacacaatagcaaggaaatccccattgagcctgccccccacctccggcgcgtgggcatcctgctggactatgataacggctctatcgccttttatgatgctttgaactccatccacctctacaccttcgacgtcgcatttgcgcagcctgtttgccccaccttcaccgtgtggaacaagtgtctgacgattatcactgggctccctatcccagaccatttggactgcacagagcagctgccgtgagcgtctggccacatggagctgctttctggggaacagtaaggttcaggccactatttaggggactgagaaagcacaggcttcatgagtgtaatgaaatctcaccagaagtgtcccgaaatcggctcagatagggctcaaaacaagagattcctctccttttactgtgtcttgtattaagtacgggctttaataatttctttaatttttttgtatttagaggaaaatctatagattatttataagagaaacataatcaggattacaacttttaggaattacttggttttgcacattaagaggcccataagtttatcagctatttacaaccttcatttcatcacaatctgtgggcttacaaaaaaacaaaaacttttgtagttttgtatgttactcatcttcttacctgatatcccatgatgatcccatggtaggtcttctcacctcgatggtgcataacaggatgtgtttgaacctagtaggggaggaaacaggctttcttactctggtttaatttgaagtgttttaattgtgatgtcaaaaagttgtatcagatcaactaaaatggagagcaagacagagaatgaaaagagttgattttggacctcggaccttgccgtggctaaatctttaccttctcatagctgatgggataatgttggaaagaaaggttctgaatcctttggccacattttgccctgcttctctcagggttaagggttctggaagaacattaagaatgagattgcaattgaaaatagtcattttgaatcctattgattattcaaaaattcaggctgatttgtcttttatcagaggtaggattctgttttatagtatagaatctactttatccttccttttaatagttcctttagacctgtgaaatttcttcactacatttaatagttctcctatttcccgctcccccatatcaattttccttttgtctccggggctgagtaaataaacatgttctgtcacaaatagcagcaccactttggattgattttgctctccaggacatcagcacatggccctgatcagcactaccacatccaaacataagtcactgaaaaacacttaatatttatgagttggtaatgacaagggacattgtataaagtactatttgctagattcatgcctcaaaagttattataaacagacctttattaaacacatcttgaaagatgtagaagtccctctatagtctagtatagtttacaatagagttgtaagaccaaaaaaaaaaaaaaaaaa

SEQ ID NO: 48537 - DNA, 900 bp, Homo Sapiens
atgcttcggttattctatttctctgctattattgcctcagttattttaaattttgtaggaatcattatgaatctgtttattacagtggtcaattgcaaaacttgggtcaaaagccatagaatctcctcttctgataggattctgttcagcctgggcatcaccaggtttcttatgctgggactatttctggtgaacaccatctacttcgtctcttcaaatacggaaaggtcagtctacctgtctgctttttttgtgttgtgtttcatgtttttggactcgagcagtgtctggtttgtgaccttgctcaatatcttgtactgtgtgaagattactaacttccaacactcagtgtttctcctgctgaagcggaatatctccccaaagatccccaggctgctgctggcctgtgtgctgatttctgctttcaccacttgcctgtacatcacgcttagccaggcatcaccttttcctgaacttgtgactacgagaaataacacatcatttaatatcagtgagggcatcttgtctttagtggtttctttggtcttgagctcatctctccagttcatcattaatgtgacttctgcttccttgctaatacactccttgaggagacatatacagaagatgcagaaaaatgccactggtttctggaatccccagacggaagctcatgtaggtgctatgaagctgatggtctatttcctcatcctctacattccatattcagttgctaccctggtccagtatctccccttttatgcagggatggatatggggaccaaatccatttgtctgatttttgccaccctttactctccaggacattctgttctcattattatcacacatcctaaactgaaaacaacagcaaagaagattctttgtttcaaaaaatag

SEQ ID NO: 48538 - DNA, 531 bp, Homo Sapiens
ttactgctgggccggaaggtggtagtcgtacgctgcgagggcatcaacatctctggcaatttctacagaaacaagttgaagaatctggctttcctcggcaagcggatgaacaccaacccttttcgaagcgcctaccacttccgggcccccagccgcatcttctggccgacagtgcgaggcatgctgcgccacaagaccaagcgaggccatgcctccctggactgcctcaaggtgtttgacggcatcccaccgccctacgataagaaaaagcggatggtggttcctgctgccctcaaggtcgtgcgtctgaagcctacaagaaagtttgcccttctggggcgacaggctcaagaggttaggtggaagtaccaggcagtgacagccaccctggaggagaagaggaaggagaaagccaagatccactactggaagaagaaacagctcatgaggctacggaaacaggccgagaagaacgtgaagaaaaacgacaaatacacagaggtcctcaagacccacggactcctggtctga

SEQ ID NO: 48539 - DNA, 1951 bp, Homo Sapiens
actcttctcgctccgctttcgccccgcatcttccaccttccttccagtccttgcggcgaccgagcccgcagtgtcagtccccagcggggacctgagtatgccggtgaagacgagagcggaaggcgaggacgacggcttcggggaagcgggtgacccgaggagactgctggagcgaccttggcgtttccgggggtgccttcccgggaaggggaatcgggatgttggcttcgaagggaccgaagggcccacctcgacccgccccgagtgggtttggagttgtaggtgctgtctcggatgcagggcgagcacccgcgagcgggtaaccagtcccgtgagagctgcaggtccccagccccgttttacagatagggaaactgaggcagctgctgggacactcgcccatatgggttttgctccacccacttccttcagccactttacagaccaggagttgagggactgctcgagcttagagtgtttaggggtggttgagggtgacccccatgttctgtgctctactctatccctatccaggccttctcccagcgccactctcacgctcctgcttgctagctcctgcttgctagctcctgctcctcccagcttcatcctcctcctgtttacattaattgctcctgatcttccacactcttgattttccggattctaactccatcaaaatgtaacttgatgtgttcaggccccggggacacctaggcacttgaggggggcgggtccgtgtttggcctgctgggcttagtaggagggtctggcccggggcggggagcgcgatgctctgctgggtcagcatctccagccacctggctttgctggtgtggcctcgcagccttgccaaatgtgagcagcttacagagcaaccagttgcacgtgcttaagctgccgaggtgacacagggcgctgtagggtccagccccacagggtcggtaggtctctccctgtgtgcggcgacgagagagtgtagaaataaagacacaagacaaagagacgagaaaaggcagctgggcccgggggaccactaccaccaatgcgcggagaccggtagtggccccgaatgtctggctgcactgttatttattggatacaaggcagaaggggcagggtaaagaatgtcagtcacctccaatgataggtaaggtcacgtgggtcacgtgtccactggacagggggcccttccctgcctggcagcggaggcagagagggagaggagacaaagagaaagacagcttacgccattatttctgcatatcagggactattagtattttcactaattgactactgctatctggaaggcagagccaggtgtacaggatggaacatgaaggcggactaggagcgtgaccactgaagcacagcatcacagggagacaggcctccagataactgcgggcgagcctgactgatgtcaggccctccacaagaggtggaggagcagagtcttctctaaactcccccggggaaagggagacccccaccctccctttcccggtctgctaagtagcaggtgttgttccttgacaccttttgctactgctggaccatgatccgcctggtaacgggcgtcttcccagatgctggcgtcaccgctagaccaaggagccctctggtggccctgtgtgggcataacagaaggctcgcactcttgtcttctggtcacacctcactatgtcccctcagctcctatctctgtatggcctggtttttcctaggctatgattatagagcgaggattatcataatattggaataaaaagtaattgctacaaactaatgattaatgatagtcatatataatcatatctaagatctatatctggtataactattcttgttttatattttattatactggaagagctcgtgtcctctgtctcttgcctcggtgcctgggtggcttgccgcccacacacaaaaaagataaatgtttgag

SEQ ID NO: 48540 - DNA, 270 bp, Homo Sapiens
agcattcagaaggaccccagcgagtttgcctggcgtgatcctgagttgcctgaggtcattcacatccttcagcaccagttcccatctgttcaggcaaatgcagcagcctacctgcagcacctgtggtttggtgacaacaacgtgaagatgaaggtgtgtaggttatggggaatcaagcttctggtttaccttttgggccacagagttttggaagttcagaagaatgcttgttgcccttcgaaatctctttttcggcaagtctacaggtga

SEQ ID NO: 48541 - DNA, 618 bp, Homo Sapiens
atgtctattatgtcctataacggaggagccatcatggccatgaaggggaagaaccgtgtggccatcgctgcagacaggcacttcgggatccaggcccagatggtgaccacggacttccaggagatctttcccatgggtggttggttgtacatcggtctggccgggcttgccactgacgtccagagagttgcccagtgcctcaagttccagctgaacctatatgagttgaaggaaggtcagcagatcaaaccttataccttcacgagcatggtggccaacttcttgtatgagaaacattttggcccctactacactgatccagtcattgctggtttggacctgaagacctttaagcccttcagttgctctctagacctcatcggcttccccatggtgactgatgactttgtggtcaatggcagctatgccgaacaaatgtacggaatgtgtgagtccctctgggaacccaacatggatccagaacacccgtttgaaaccatctccccagccatgctgaatgctgtggactggggtgcagggtcaggcatgggagtcatcatccacatcaccaagaaggacaaaatcaccaccaggacactgaaggcccaaatggactaa

SEQ ID NO: 48542 - DNA, 953 bp, Homo Sapiens
ggggcgtggcggcggcgatggggaaactgcagtcgaagcacgccgccgccgcccgcaagcggagagagagcccggaaggggacagcttcgtggcgtccgcgtacgcgagcggccgcaaaggcgcggaggaagcggagcggcgcgcgcgggacaagcaggagctgcccaatggggaccccaaggaggggcctttccgggaggaccagtgtcccctacaggtggcactccccgctgagaaagctgagggccgcgagcacccgggacaactcctcagcgcagatgacggagagagggcagcaaaccgcgagggcccgcgaggaccgggcgggcagcgcctcaacattgacgcactccagtgcgatgtctcggtggaggaggacgaccgccaggagtggacgttcacgctctatgactttgacaactgcgggaaggtcaccagggaggacatgtccagcctcatgcacaccatctatgaggtcgtggatgcctcggtcaaccactcctcgggcagcagcaagaccctccgtgtgaagctaaccgtcagccctgagccctccagcaagaggaaggagggtcctcctgctggccaggaccgggagcccacccgttgcaggatggagggtgaactggcagaggagccaagggtggctgacaggaggttgtctgcacacgtcaggaggcccagtactgacccccagccctgctcggagcgggggccctactgcgtggacgagaacacggagcgcagaaaccactacctggacctcgccgggattgagaactacacgtccagattcggccctgggtctcagctgtgcgagaagagaagctccgctcccaggacacacagtggggacaaggctagaggagtcggcctttgcagggagctgtggagccaggcaggtcacccacagtggccaggccccttcccttcagggctggtggccgtctga

SEQ ID NO: 48543 - DNA, 1366 bp, Homo Sapiens
gtgactgcctcttccagggcgggcggtgtggtgcacgcattgctgtgctccaactccctcagggcctgtgttgccgcactctgctgctatgagcttcctcaaaagtttcccgccgcctgggccagcggaggggctcctgcggcagcagccagacactgaggctgtgctgaacgggaagggcctcggcactggtaccctttacatcgctgagagccgcctgtcttggttagatggctctggattaggattctcactggaataccccaccattagtttacatgcattatccagggaccgaagtgactgtctaggagagcatttgtatgttatggtgaatgccaaatttgaagaagaatcaaaagaacctgttgctgatgaagaagaggaagacagtgatgatgatgttgaacctattactgaatttagatttgtgcctagtgataaatcagcgttggaggcaatgttcactgcaatgtgcgaatgccaggccttgcatccagatcctgaggatgaggattcagatgactacgatggagaagaatatgatgtggaagcacatgaacaaggacagggggacatccctacattttacacctatgaagaaggattatcccatctaacagcagaaggccaagccacactggagagattagaaggaatgctttctcagtctgtgagcagccagtataatatggctggggtcaggacagaagattcaataagagattatgaagatgggatggaggtggataccacaccaacagttgctggacagtttgaggatgcagatgttgatcactgaaaatgatttatgcaagtttaagattctgctcctaagtgtaggagagaacttggtgcctcttccactctggagtgaagttaatgaaagtctttttccttttccaaaacccaacctgaaccagttctttcttgagacagactatactgagacaacaagttgtcaccagcagaagatagataatatgacctttattaacttgatgaattaacttaaccaagagggtatttgtagtttactatttaccctaaaactttctgtgtctgggtaccctctgagtaggcctataattcctaccttgactgtgtgcatcatttgtaagctagcagatctatgtggtgaaaatgcacaggagcttggtagactgcgggggaaagagagagctcctttcgccatgttttaccagtctgctgttataacctcttaggttgtatcctttaatttccagccttttaggttagtttctgtaacagaacaagtgagtctgggatgaagtcctcaaagtacttcaaatggtaattgttttgtttttgtaatagcttaacaaataaacctaggttttctata

SEQ ID NO: 48544 - DNA, 174 bp, Homo Sapiens
aaaggtctggagggtgagcgacctgcaagactcacaaaaggggaagccgacagagatacctacagacggagttttgtgccccctggtgccaacaagaaagtcgaggctggggctgtgtcagcaaccgaattccagtttaaaggcagatttggtcgtggacgtggtcagccacct

SEQ ID NO: 48545 - DNA, 1440 bp, Homo Sapiens
atgagggtcctctctggcactagcctcatgctctgcagcctgctgctgctgctccaggccctgtgcagccctggcctcgccccccagtccagaggccatctctgccggacgcggcccacagacctggtgtttgttgtcgacagctctcgcagcgttcggcctgttgaatttgagaaagtgaaggtattcctgtcccaggtcatcgagtcgctggacgtggggcccaatgccacccgggtgggcatggtcaactatgccagcaccgtgaagcaggagttctcgctgcgggctcatgtctccaaggccgcactgctgcaggctgtgcgccgtatccagccgctgtccacaggcaccatgaccggcctggccatccagttcgctatcaccaaagccttcggcgatgcagagggtggtcgttccaggtcccctgacatcagcaaggtggtcatcgtggtgacagacgggaggccccaggacagcgtgcaggacgtgtctgcgcgggcccgggccagcggcgtcgagctgttcgccatcggagtgggcagcgtggacaaggccacgctgcggcagatcgccagcgagccgcaggacgaacacgtcgattacgtggagagctacagcgtcatcgagaagctgtccaggaagttccaggaggccttctgcgtggtgtcagacctgtgcgccacaggggaccatgactgtgagcaggtgtgcatcagctcccccggttcctacacctgcgcctgccacgagggcttcactctgaacagcgacggcaagacctgcaatgtctgcagtggtggtggtggcagctcggccactgacctggtcttcctcattgacggatccaagagtgtgaggccagagaactttgagctggtgaagaagttcatcagtcagatcgtggatacgctggacgtgtcagacaagctggcccaggtggggctggtgcagtactcaagctctgtgcgccaggagttccccctgggtcgcttccacaccaagaaggacatcaaggcggctgtgcggaatatgtcctacatggagaagggcacaatgactggggctgctctcaagtacctcattgacaattccttcactgtgtccagtggggctaggcccggggcccagaaggtgggcattgtcttcactgatggccggagccaggactacattaatgatgctgccaagaaggccaaagacctcggctttaagatgtttgctgtgggtgtgggcaatgccgtggaggatgagctgagggaaatagcctcagagcctgtggcagagcactacttctacacggctgacttcaagaccatcaaccagataggcaagaagttgcagaagaagatctgtgtggaggaagacccgtgtgcctgcgagtccctggtgaaattccaagccaaagtggaggggctgctgcaggccctgaccaggaaa

SEQ ID NO: 48546 - DNA, 2091 bp, Homo Sapiens
atgaaagctccgattccacacttgattctcttatacgctacttttactcagagtttgaaggttgtgaccaaaagaggctccgccgatggatgcactgactggtctatcgatatcaagaaatatcaagttttggtgggagagcctgttcgaatcaaatgtgcactcttttatggttatatcagaacaaattactcccttgcccaaagtgctggactcagtttgatgtggtacaaaagttctggtcctggagactttgaagagccaatagcctttgacggaagtagaatgagcaaagaagaagactccatttggttccggccaacattgctacaggacagtggtctctacgcctgtgtcatcagaaactccacttactgtatgaaagtatccatctcactgacagtgggtgaaaatgacactggactctgctataattccaagatgaagtattttgaaaaagctgaacttagcaaaagcaaggaaatttcatgccgtgacatagaggattttctactgccaaccagagaacctgaaatcctttggtacaaggaatgcaggacaaaaacatggaggccaagtattgtattcaaaagagatactctgcttataagagaagtcagagaagatgacattggaaattatacctgtgaattaaaatatggaggctttgttgtgagaagaactactgaattaactgttacagcccctctgactgataagccacccaagcttttgtatcctatggaaagtaaactgacaattcaggagacccagctgggtgactctgctaatctaacctgcagagctttctttgggtacagcggagatgtcagtcctttaatttactggatgaaaggagaaaaatttattgaagatctggatgaaaatcgagtttgggaaagtgacattagaattcttaaggagcatcttggggaacaggaagtttccatctcattaattgtggactctgtggaagaaggtgacttgggaaattactcctgttatgttgaaaatggaaatggacgtcgacacgccagcgttctccttcataaacgagagctaatgtacacagtggaacttgctggaggccttggtgctatactcttgctgcttgtatgtttggtgaccatctacaagtgttacaagatagaaatcatgctcttctacaggaatcattttggagctgaagagctcgatggagacaataaagattatgatgcatacttatcatacaccaaagtggatcctgaccagtggaatcaagagactggggaagaagaacgttttgcccttgaaatcctacctgatatgcttgaaaagcattatggatataagttgtttataccagatagagatttaatcccaactggaacatacattgaagatgtggcaagatgtgtagatcaaagcaagcggctgattattgtcatgaccccaaattacgtagttagaaggggctggagcatctttgagctggaaaccagacttcgaaatatgcttgtgactggagaaattaaagtgattctaattgaatgcagtgaactgagaggaattatgaactaccaggaggtggaggccctgaagcacaccatcaagctcctgacggtcattaaatggcatggaccaaaatgcaacaagttgaactccaagttctggaaacgtttacagtatgaaatgccttttaagaggatagaacccattacacatgagcaggctttagatgtcagtgagcaagggccttttggggagctgcagactgtctcggccatttccatggccgcggccacctccacagctctagccactgcccatccagatctccgttctacctttcacaacacgtaccattcacaaatgcgtcagaaacactactaccgaagctatgagtacgacgtacctcctaccggcaccctgcctcttacctccataggcaatcagcatacctactgtaacatccctatgacactcatcaacgggcagcggccacagacaaaatcgagcagggagcagaatccagatgaggcccacacaaacagtgccatcctgccgctgttgccaagggagaccagtatatccagtgtgatatggtga

SEQ ID NO: 48547 - DNA, 2201 bp, Homo Sapiens
gaaacatgatccagctgaaggactgattgcaggaaaacttggcagctccccaaccttggtggcccagggagtgtgaggctgcagcctcagaaggtgtgagcagtggccacgagaggcaggctggctgggacatgaggttggcagagggcaggcaagctggcccttggtgggcctcgtcctgagcactcggaggcactcctatgcttggaaagctcgctatgctgctgtgggtccagcaggcgctgctcgccttgctcctccccacactcctggcacagggagaagccaggaggagccgaaacaccaccaggcccgctctgctgaggctgtcggattaccttttgaccaactacaggaagggtgtgcgccccgtgagggactggaggaagccaaccaccgtatccattgacgtcattgtctatgccatcctcaacgtggatgagaagaatcaggtgctgaccacctacatctggtaccggcagtactggactgatgagtttctccagtggaaccctgaggactttgacaacatcaccaagttgtccatccccacggacagcatctgggtcccggacattctcatcaatgagttcgtggatgtggggaagtctccaaatatcccgtacgtgtatattcggcatcaaggcgaagttcagaactacaagccccttcaggtggtgactgcctgtagcctcgacatctacaacttccccttcgatgtccagaactgctcgctgaccttcaccagttggctgcacaccatccaggacatcaacatctctttgtggcgcttgccagaaaaggtgaaatccgacaggagtgtcttcatgaaccagggagagtgggagttgctgggggtgctgccctactttcgggagttcagcatggaaagcagtaactactatgcagaaatgaagttctatgtggtcatccgccggcggcccctcttctatgtggtcagcctgctactgcccagcatcttcctcatggtcatggacatcgtgggcttctacctgccccccaacagtggcgagagggtctctttcaagattacactcctcctgggctactcggtcttcctgatcatcgtttctgacacgctgccggccactgccatcggcactcctctcattggtgtctactttgtggtgtgcatggctctgctggtgataagtttggccgagaccatcttcattgtgcggctggtgcacaagcaagacctgcagcagcccgtgcctgcttggctgcgtcacctggttctggagagaatcgcctggctactttgcctgagggagcagtcaacttcccagaggcccccagccacctcccaagccaccaagactgatgactgctcagccatgggaaaccactgcagccacatgggaggaccccaggacttcgagaagagcccgagggacagatgtagccctcccccaccacctcgggaggcctcgctggcggtgtgtgggctgctgcaggagctgtcctccatccggcaattcctggaaaagcgggatgagatccgagaggtggcccgagactggctgcgcgtgggctccgtgctggacaagctgctattccacatttacctgctagcggtgctggcctacagcatcaccctggttatgctctggtccatctggcagtacgcttgagtgggtacagcccagtggaggagggggtacagtcctggttaggtggggacagaggatttctgcttaggcccctcaggacccagggaatgccagggacattttcaagacacagacaaagtcccgtgccctgtttccaatgccaattcatctcagcaatcacaagccaaggtctgaacccttccaccaaaaactgggtgttcaaggcccttacacccttgtcccacccccagcagctcaccatggctttaaaacatgctgtcttagatcaggagaaactcgggcactccctaagtccactctagttgtggacttttccccattgaccctcacctgaataagggactttggaattctgcttctctttcacaactttgcttttaggttgaaggcaaaaccaactctctactacacaggcctgataactctgtacgaggcttctctaacccctagtgtcttttttttcttcacctcacttgtggcagcttccctgaacactcatcccccatcagatgatgggagtgggaagaataaaatgcagtgaaaccc

SEQ ID NO: 48548 - DNA, 1266 bp, Homo Sapiens
gaattcaggcaggccctgggacagtttgtctctgctccccccagtgttggggcctcagctaggaagactttaaggctgggagagatttgatgcctgggagagactcaatcactgtgtaaccgaacacttgcttcttacagagtccaattgacaagggtgaggtataatagaaagacagaatttattagccaaaaatagtaaagggaaagcaatcggattcctatccaaattaacggcttctatttttaggaagaaggcaggggtttaaaaagggaaaacttgataaggaaggcagacaagaactgggctgagtacagtgtctgtgtgtcttattctggtggctatcttgggtcctggtccacctggaccctgggctgatggcatttcaacaacagccaggttgttaactagctgtcttgaagtaatctctggaactttgcagctgggtctccagacttggtctgtgtgtctcaggattgacccctggaacttctaagaagacacataattagatactagtagacagttggataaatgtgaagggagtatatacaatgagaaagggagggatgtggactctagaaaaggtttctgcagtttgcttcaaggttatatctttaaacccaaggaaaaggggaaaaaatttttaatgcagtttgaagctaagctgcctggttacaactgggtactaggatcatctggaggaatcttcactcagctgtctggcaggtgacactgggacttcatctaggctgttggccaaacacctctccatgtggcctttgcttcctcacagcacagtgcctgggtcccaagaacgaccatcccaagaggacaagacagaaccatatcaccatttgtgatttgctcttggaagtcacatgatatcacttccattgtagtcacaggctcacccagattcagaataaggggacacagaacctctcagtgggaaccatctgtggcacattgtaagaggaacatgtgggatgagagatgttgagggttcatcatcctaaaacatcactttaatcctgtcttcccattactgaccaaaacaaattctggcattaaaggcactctacacttaggcctcaaatgcctttccttacttcctgtattatctcctccattcagatcagaccgaactactcagtcacccacacttgtcagactcattcttctcttgccctttttctcaaggaatccctctcttgacctgagaaattctacctctcacttaaaagtgactgttcactgaattcc

SEQ ID NO: 48549 - DNA, 381 bp, Homo Sapiens
gaagaaaaaaaaattcaaaagatctacgaattcagggtaggtttcttgaaaatattaataagaaagtctgctagcagactaatacagaggatgattgaaataaacacaattagaaatgacaaagggaatgtaattaccactgaccccacagaaatagaaacaaccatcagaaactactgcaaacacttctgtgcatacaaactagaaaacttcaaagagatggataaattcctggacaaatacaccctcccacaactgagccaggaagaaattgatttgctgaacagaccaataacaagctccgaaattgaatcagtaataaataacctaccaatcaaaaaaagcccagaacatgatggattcccagccatattctactag

SEQ ID NO: 48550 - DNA, 1359 bp, Homo Sapiens
atgctggcctgtctgcagaggacccagaacgccccgggccaacacctggcctgcccgagcaagagcctggagctgcgcaagtgcgaggcggtggccagcgccatgcattcctcccgctacccgagcccagcagaactggacgcctatgccgagaaggtggccaacagcccgctgtccatcaagatcttccccaccaacatccgtgtgccccagcacaagcacctcagccgcacagtcaatggctatgacaccagtggccagcgctacagcccctacccacagcacaccgctggctaccagggccttctggccattgtcaaggccgcggtttcctcctccagcacggccgcaccagctgggcccgccaaaagtgtgctcaagagcgccgagggcaagcggaccaagctgtcaccggccgccgtgcaggtgggcattgcgccctacccagtgcccagcactctgggtcccttggcctaccccaagccacctgaggcgcctgctccaccacccggcctgcccgcagccgccactgccgcctccgtcatccccctgccgggccggggcctgcccctgccaccttccaacctgccctccatccacagcctcctgtaccagctcaaccagcagtgccaggccccgggcgccgcaccccctgcctgccagggcatggctattccccatcccagccctgccaagcacggcccagtgcccagcttccccagcatggcctactcggctgcagccggtctgcccgactgccggaaaggcactgagctgggccagggagccacccaagccttgacgttggctggggccgccaagcctgcagggtacgcagacagcggcctggattacctgctgtggccgcagaaaccgcccccaccgccgccccagccactgcgtgcctacagtgggagcacggtggccagcaagtcccctgaggcttgcgggggccgggcatacgagcgggccagcgggtcacccctcaactgtggcgtggggctgcccaccagcttcaccgtaggccagtactttgcggccccgtggaacagtgtgctggtgacacccaccagcgactgctacaacccagcggcggcggtggtggtcacggagctggggccgggggcagcccgggagctggctgggccccctgcagatgccctctcgggcctgcccagcaagagtgtgtgcaacacatcggtgctgagcagcagcctgcagtcactggagtatctcatcaacgacatccggccgccctgcatcaaggagcagatgctgggcaagggctatgagacggtggccgtgccccggctactcgaccaccagcatgcccacatccgcctacccgtctacagataa

SEQ ID NO: 48551 - DNA, 729 bp, Homo Sapiens
atggctgcccccgcagtgaaggttgcccgaggatggtcgggcctggcgttgggcgtgcggcgggctgtcttgcagcttccagggctaactcaggtgagatggagccgctatagtcctgaattcaaggatcccttgattgacaaggaatattatcgcaagccagtggaggagctaactgaggaggagaaatatgttcgggagctcaagaagactcagctcatcaaagctgctccagcagggaaaacaagttctgtgtttgaagacccagtcatcagtaaattcaccaacatgatgatgataggaggaaacaaagtactggccagatccctcatgattcagactctggaagctgtgaaaaggaagcagtttgagaagtaccatgccgcttctgcagaggaacaggcaaccatcgaacgcaacccctacaccatcttccatcaagcactgaaaaactgtgagcctatgattgggctggtacccatcctcaagggaggccgtttctaccaggtccctgtacccctacccgaccggcgtcgccgcttcctagccatgaagtggatgatcactgagtgccgggataaaaagcaccagcggacactgatgccggagaagctgtcacacaagctgctggaggctttccataaccagggccccgtgatcaagaggaagcatgacttgcacaagatggcagaggccaaccgtgccctggcccactaccgctggtggtag

SEQ ID NO: 48552 - DNA, 387 bp, Homo Sapiens
atgttgcttgctcctattttggcaatgctaaccattctttcctgcttaaaatgcttcatgacactgtgctttctaagtgtccctttctcctctttggctggttcttttcagtctccttcaggggctgtacttcctttacctgatccctctcaattcttcctcagagttccaaatcctggctccccgttactctcagtaaataccatccctctggttgaacttaacctacgtattcgttctgtttttgttacacaaatatttaatgagcggctattacgtgacgggttctttttaataagcactggggataaaaacatgcatgactgctgcattagtggtctgattggaaagaatgcaaaatgtgcatggaatcatgaaagcatataa

SEQ ID NO: 48553 - DNA, 549 bp, Homo Sapiens
atgcattttctcctcagcacaaagcagattccaggtgtatataattcaccattcagaaaaaaattccgtggcctgtcatgctggctcacacctgtaatcccagcactttgggaggccaaggcaggaagatcacttgagcccaagagttcgagaccagtctgggcacaagaccccctctctattaaaaaaaaaaaattagctgagtatggtggtacacacctgcagctacttgggagactgaggctggaggatcacttgagccactgggaacgacagaacaagactctgtctctaaaacacacacacacacacacacacacacacacacacgagagagagagagagagagagagagagagagaaaagcctggtccatgggagttgtggttacagaaggcaaagcttttaatataccaaagatctaaagttaagcagaagtactccataagccttaccaattggctagcttgtataagcacccagtcttttctgaagtgctgctacctctcaataggaagcaatatcggggtccttccaaggtatcactga

SEQ ID NO: 48554 - DNA, 1603 bp, Homo Sapiens
ggtctctttggcttcagaaattaccaagaaagcctggaccccgggtgaaacggagaaatggacacaagtcccctgtgtttctccattctgttggttttatgcatctttatccaatcaagtgcccttggacaaagcctgaaaccagagccatttggaagaagagctcaagctgttgaaacaaacaaaacgctgcatgagatgaagaccagattcctgctctttggagaaaccaatcagggctgtcagattcgaatcaatcatccggacacgttacaggagtgcggcttcaactcctccctgcctctggtgatgataatccacgggtggtcggtggacggcgtgctagaaaactggatctggcagatggtggccgcgctgaagtctcagccggcccagccagtgaacgtggggctggtggactggatcaccctggcccacgaccactacaccatcgccgtccgcaacacccgccttgtgggcaaggaggtcgcggctcttctccggtggctggaggaatctgtgcaactctctcgaagccatgttcacctaattgggtacagcctgggtgcacacgtgtcaggatttgccggcagttccatcggtggaacgcacaagattgggagaatcacagggctggatgccgcgggacctttgtttgagggaagtgcccccagcaatcgtctttctccagatgatgccaattttgtggatgccattcatacctttacccgggagcacatgggcctgagcgtgggcatcaaacagcccataggacactatgacttctatcccaacgggggctccttccagcctggctgccacttcctagagctctacagacatattgcccagcacggcttcaatgccatcacccagaccataaaatgctcccacgagcgatcggtgcaccttttcatcgactccttgctgcacgccggcacgcagagcatggcctacccgtgtggtgacatgaacagcttcagccagggcctgtgcctgagctgcaagaagggccgctgcaacacgctgggctaccacgtccgccaggagccgcggagcaagagcaagaggctcttcctcgtaacgcgagcccagtcccccttcaaagtttatcattaccagttcaagatccagttcatcaaccaaactgagacaccaatacaaacaacttttaccatgtcactactcggaacaaaagagaaaatgcagaaaattcccatcactctgggcaaaggaattgctagtaataaaacgtattcctttcttatcacgctggatgtggatatcggcgagctgatcatgatcaagttcaagtgggaaaacagtgcagtgtgggccaatgtctgggacacggtccagaccatcatcccatggagcacagggccgcgccactcaggcctcgttctgaagacgatcagagtcaaagcaggagaaacccagcaaagaatgacattttgttcagaaaacacagatgacctactacttcgcccaacccaggaaaaaatcttcgtgaaatgtgaaataaagtctaaaacatcaaagcgaaagatcagatgagatttaatgaagacccagtgtaaagaataaatgaatcttactcctt

SEQ ID NO: 48555 - DNA, 933 bp, Homo Sapiens
aaaactgatcctaaaaatgaagaggaagaaaagcggcgaattgaggctcggcgagagaaacaaaggcgcagaagagaaaaaaacagtgagaaatacggagatggatacagaatggcatttacatgttcattttgtaaatttcgaacatttgaagaaaaagatattgaactgcatctggaaagttcttcacatcaggaaacattagatcatatacagaaacaaactaaatttgataaagtagttatggagtttttgcatgagtgtatggtgaataaattcaagaaaacatctattcgtaagcaacagacaaataatcaaacagaagtagttaaaataattgaaaaagatgttatggaaggtgttactgtagatgatcacatgatgaaggtagagacagttcattgcagcgcttgcagtgtttatatccctgctttacatagttcagttcagcagcacttaaaatctcctgatcatatcaaagggaagcaggcttataaggaacaaataaaaagagagagtgtcttgactgctacaagcattttaaataatccaatagtgaaggcgcgatatgaacgttttgttaagggtgagaatccttttgaaattcaagaccattctcaggatcagcaaatagaaggagatgaggaggatgaagagaagattgatgaacctattgaagaagaggaggatgaagatgaggaagaagaagcagaggaagtgggggaagtagaggaagtggaagaagtagaggaagtgagagaaggaggaatagagggcgagggaaatatacagggagtaggggaaggaggggaagtaggggtagtgggagaagtagagggagtgggggaagtagaggaagtagaggaattagaggaagagacagcaaaggaagaacctgctgacttccctgttgagcaacctgaagaaaattaa

SEQ ID NO: 48556 - DNA, 888 bp, Homo Sapiens
gtgaaggccagagtaaacggatttggccttactgggtgcctgatcactaggagttttaactgtagcaaagtggttattgtcaccatcagtgacctcttcattgacctcaattacatggtccacatgttccagtatgattccacccatggcaagttccacaccatcaaggctgagaatgggaagcttgtcatcaatggcaatcccattaccatcttccaggagcaagatcccatccaaatcaaacaaggggatgccagtgctgattatcttgtggaatccaccagcatcatcactaccttggaaaagactagggctcacttaaaggggatgatttctcccccttctgctgatgcccccatgtttgtgatgggtgtgaatcatgagaaaaacaaaaacaacttcacaatcatcaacaatgctttctgttccaccaactgcttagcacccccagccaaggtcatccatgacaactttggcatcatggagggattcatgaccacagtccatgccatcactgccacccagaagacgaagacaacccctctcggaaactgggatgacagctatggagctccacagacatcacccctgcaattaactagtgttgccggcaaagtcatccccacactgaatgagaacctcactggcatggccttctgtgtccccactgccaacatgttggttgtggacctgacctgccatctaaagaaacctgccaaatatggtaacaccaagaaggtaatgaaggaggcacggaagggcccctcaagagcatcgtggtgctacactgagcaccaagttgtctcctccaactataacagtgaccgaccttccactttcgacgttggggctggcattgtcctcagcgataactctgtcaagctcata

SEQ ID NO: 48557 - DNA, 258 bp, Homo Sapiens
gtcggaatagtcagtaaatacaggacccaccatggggcctccctctggaaaatggtgaaggaaattgaaatcagccagcacaccaagtacacttgctctttctgtggcaaaaccaagatgaagagacgagctgtgaaaatcaggcactgtaattcctgcatgaagacagtggctggcagtgcctggacctacaacaccacttcggctgtcatggtgaagtctgccatcagaagactgaaggaattgaaagaccagtag

SEQ ID NO: 48558 - DNA, 498 bp, Homo Sapiens
attctttccccaagtctctatggtagcgtcagcgtcggaggcggtagtgacggtggcgtttccttgaggaagagtgagggttccaacttttctgcttatctgggaggtgttgggcgcggacagtcgagatgtcagagaaaaagcagccggtagacttaggtctgttagaggaagacgacgagtttgaagagttccctgccgaagactgggctggcttagatgaagatgaagatgcacatgtctgggaggataattgggatgatgacaatgtagaggatgacttctctaatcagttacgagctgaactagagaaacatggttataagatggagacttcatagcatccagaagaagtgttgaagtaacctaaacttgacctgcttaatacattctagggcagagaacccaggatgggacactaaaaaaatgtgtttatttcattatctgcttggatttatttgtgtttttgtaacacaaaaaataaatgttttgatataa

SEQ ID NO: 48559 - DNA, 1548 bp, Homo Sapiens
atgggggactggaatctccttggagatactctggaggaagttcacatccactccaccatgattggaaagatctggctcaccatcctgttcatatttcgaatgcttgttctgggtgtagcagctgaagatgtctggaatgatgagcagtctggcttcatctgcaatacagaacaaccaggctgcagaaatgtatgctacgaccaggcctttcctatctccctcattagatactgggttctgcaggtgatatttgtgtcttcaccatccctggtctacatgggccatgcattgtaccgactgagagttcttgaggaagagaggcaaaggatgaaagctcagttaagagtagaactggaggaggtagagtttgaaatgcctagggatcggaggagattggagcaagagctttgtcagctggagaaaaggaaactaaataaagctccactcagaggaaccttgctttgcacttatgtgatacacattttcactcgctctgtggttgaagttggattcatgattggacagtaccttttatatggatttcacttagagccgctatttaagtgccatggccacccgtgtccaaatataatcgactgttttgtctcaagaccaacagaaaagacaatattcctattatttatgcaatctatagccactatttcacttttcttaaacattcttgaaattttccacctaggttttaaaaagattaaaagagggctttggggaaaatacaagttgaagaaggaacataatgaattccatgcaaacaaggcaaaacaaaatgtagccaaataccagagcacatctgcaaattcactgaagcgactcccttctgcccctgattataatctgttagtggaaaagcaaacacacactgcagtgtaccctagtttaaattcatcttctgtattccagccaaatcctgacaatcatagtgtaaatgatgagaaatgcattttggatgaacaggaaactgtactttctaatgagatttccacacttagtactagttgtagtcattttcaacacatcagttcaaacaataacaaagacactcataaaatatttggaaaagaacttaatggtaaccagttaatggaaaaaagagaaactgaaggcaaagacagcaaaaggaactactactctagaggtcaccgttctattccaggtgttgctatagatggagagaacaacatgaggcagtcaccccaaacagttttctccttgccagctaactgcgattggaaaccgcggtggcttagagctacatggggttcctctacagaacatgaaaaccgggggtcacctcctaaaggtaacctcaagggccagttcagaaagggcacagtcagaacccttcctccttcacaaggagattctcaatcacttgacattccaaacactgctgattctttgggagggctgtcctttgagccagggttggtcagaacctgtaataatcctgtttgtcctccaaatcacgtagtgtccctaacgaacaatctcattggtaggcgggttcccacagatcttcagatctaa

SEQ ID NO: 48560 - DNA, 192 bp, Homo Sapiens
atgagctcccagattcatcaaaattattccacggagggtgaggctaccatcaaccgcctggtcaatttgcacctgcgggcctcctacatctgcctctgtctgggcttctattcccaccgtgataatgtgtctctggaaggcatgggtcactttggcgaattggctgaggagaagcgccagggcacagagcgt

SEQ ID NO: 48561 - DNA, 348 bp, Homo Sapiens
ctgagctgctaccgggaccatcagttcagtggccgtaaatttcagcaggaaaaattactgaaggaaagctccacattgaatatggggaatctttccttttatacaaccgaagagaaaatacatgaactctttagtagatctgatatcaggaatatctttatgggcctggataaaataaagaaaacagcatgtggtttttgctttgtagaatgccataacagagctgatgctgaaaatgccatgcggtttctaactgggacctgcctagatgaatggattatctgcactgattgggatgtcggttttagagagggtcaacagtatggtcgcggtaaatctgggggtcag

SEQ ID NO: 48562 - DNA, 655 bp, Homo Sapiens
ggaagttatactagaataggcagcccaggcttccggttctaggtgcttcaggagccgtggcttaaggtgcagacatggccaagtccacaccatacaccaccagtcccgaaaatggcacagaaatggtatcaagaaaccgcgatcacaaagatacaaatctcttaagggggtggactccaagttcctgaggaacatgcgctttgccaagaagcacaagaagggcctaaagaagatgcacaccaacaatgccaaggccatgagtccacgtgccgaggctctcaaggccctcgtaaagcccaaggaggttaagcccaagatcccaaagggtgtcagccataaacttgatcgacttgcctacattgcccaccccaaccttgggaagcttgctcgtgcccgcatggccaaggggctcaggctgtgccggcccaaggccaaggccaaggatcaaaccaaggcccaggctgcagctccagcttcagtttcagctcaggctcccaaagctgcccagtgccctacaaagacttcagagtagatatctctgtctgccaacgtgaggacagaaggacaggtgccacccaccccgggctgccgtctgcatggggctggggtcctcctgcgctattggtacaaataagcctgaggcagaaaaaaaaaa

SEQ ID NO: 48563 - DNA, 654 bp, Homo Sapiens
gtgctttttgtcttatttctggccttctacctcttcaccttgctggggaacctactcattcttctggccgtcctcactttctccaacctccacacccccatgtatttcttcctgggaaacctgtctgtgtttgacatatttttcccttcagtgagttcccccaaaatgatgctctgcttagtgggacaaagctgcaccatctctttccagggttgtgcctcccagctcttctttcaccatttcctgggttgcaccgagtgtttcctgtacactgtgatggcctatgaccgatttgcagccatctgccaccctttgccatacacggtcatcatgaaacgcagggtgtgtgccctcctgacgctaggcacctggacggggagctgtctgcatgcatctgtcctcacactcctcatctttaagttatcctactgtggccccaatgaagtggactttttctgtgatattccggtggtgctgcccctggcctgcgcagacacctctctagcacggacagtgagtttcatcaacgtaggtgttgttgcgctcatgtgttttcttcttatcctcacctcttatgcttgcattgttatctctatactgaaaatcagttcctcagaaggtaggcgcagagccttctcaacctgcagtgcccat

SEQ ID NO: 48564 - DNA, 405 bp, Homo Sapiens
ctgagccagaccctggcagctctggattatccgagctttgtgaagcctgtggatgaacacgtttgcagagtgctgttactcttcactaggatcccaaagtccccaaggcatgaacattatcccaccccaatggctggcaacctcccagagaaacccccaaccccacccaatctgccctacttggtgcagtgccctcagatgcacaaaatccttgtctataaggacatcacacatggcaactttcagatgactgtgaccccaaaggtggagggggacatctgggcgctgctgaaggatgtggaggattttctgagcccactgctgggaaagacacctgttcctgtgtacccgtacccgtacctcagccaggtcaatgaggtgacaggtatgctgcaggtcagggga

SEQ ID NO: 48565 - DNA, 3621 bp, Homo Sapiens
atgaagaagctagggagaattcatccaaacaggcaagtgttggcctttattttgatggtgttcttgtctcaggttcgcctcgagcctattcgttattctgtgttggaggaaacagagagcggctcctttgtagcccatctggccaaggatctgggcctgggaattggggaactggcctcccggtcagcccgggtgctgtctgacgatgacaagcagcgtttgcagctggatcgtcagactggagatttgcttctgagggagaaactagaccgggaagagctctgtggtcctattgaaccgtgtgtactgcatttccaagtgttcctggaaatgccggtgcaattttttcaaggagaattattgatccaggacataaatgatcactctccaatattccctgaaagggaagtgctcttgaaaatactagaaaatagccagccgggtactctatttccgttgctaatagctgaggatttggatgtgggcagcaatggtcttcaaaaatacacaatcagccccaattctcattttcacattctcactcgaaatcatagtgagggcaagaaatacccagatttggtgcaggacaaaccactggatcgagaggagcagcctgagttcagcttaaccctcgtggcgctggatggtgggtcaccacctaggtctggcacggtcatggttcgaatcctgatcatggacatcaatgacaatgctcctgagtttgtgcacactccatatggggtgcaggtcctggaaaacagccccctagactctccaattgttagggtcttagctagagatatagatgctggaaacttcgggagtgtttcttatggcttattccaagcatcagatgaaattaaacaaactttctcaataaatgaagtcacgggagaaatactgttgaaaaaaaaattggatttcgaaaaaattaaatcttaccatgtagaaattgaggccacagatggaggaggcctttctggaaaaggcactgtagtcatagaggtggtggatgtgaatgacaatcccccagaacttatcatatcttcactcaccagctccatcccagaaaatgctcctgagacggtagtctctatcttccgaattcgagatagagattccggagaaaatggaaagatgatttgctctattccagataatctaccgtttattctaaaaccaactttgaagaatttttacaccctggtaacagagagaccactggaccgagagaccagcgctgagtacaacatcaccatcgccgtcactgacttggggacacccaggctgaaaacccagcagaacataaccgtgcaggtctccgacgtcaatgacaacgcccccgccttcacccaaacctcctacaccctgttcgtccgcgagaacaacagccccgccctgcacatcggcagtgtcagcgccacagacagagactcgggcaccaacgcccaggtcacctactcgctgctgccgccccaggacccgcacctgcccctcgcctccctggtctccatcaacgcagacaacggccacctgttcgccctcaggtcgctggactacgaggccctgcaggcgttcgagttccgcgtgggcgcctcagaccgcggttctccggctttgagcagcgaggcgctggtgcgcgtgctggtgctggacaccaacgacaactcgcccttcgtgctgtacccgctgcagaatggctccgcgccctgcaccgagctggtgccccgggcggccgagccgggctacctggtgaccaaggtggtggcggtggacggcgactcgggccagaacgcctggctgtcgtaccagctgctcaaggccacggagcctgggctgttcggcgtgtgggcgcacaatggcgaggtgcgcaccgccaggctgctgagcgagcgcgacgcagccaagcacaggctcgtggtgcttgtcaaggacaatggcgagcctccgcgctcggccaccgccacgctgcacgtgctcctggtggatggcttctcccagccctacctgcctctccctgaggcggccccggcccaggcccaggccgactctctcaccgtctacctggtggtggcgttggcctcggtgtcgtcgctcttcctcttctcggtgctcctgttcgtggcggtgcggctgtgcaggaggagcagggcggcctcggtgggtcgctgctcggtgcccgagggcccctttccagggcatctggtggacgtaagcggcaccgggaccctgtcccagagctaccagtacgaggtgtgtctgacaggagactctgggactggtgagttcaagttcctgaagccaatatttcctaatctcttggttcaggacaccgggagggaagttaaggaaaaccccaagttcagaaatagcttggtattcagttaagtattgtatttagttcagtgaaccgcccgttagttttgtcaaacttcccactgcaatgcctttatttaaaaaaattgtctacttatctaaatattcataccacaatttcaaacctactcatgtccctgataaagctaaatttgtcccttttttattgttattaattgcacttaacatttttagttatactggatattgagtatggattttctctatatttgatctattggtgattaatctttttgtaatcataaattactcaattaggataaaaataaattatgttttaatgaaattcttaaattaacatctttttaatggaacatttaagtgaatatatgaatattgaatttctaaatatttgttgtgcctgtctttaccatgtaacttaatgtttgcaaggccagagtgtttgaaagttttgtatttaactttataattaccttgtcctttctggttgactatactaggctaagccctcttaatagccatgagtgtaaaatttagtttactcatttttcacaaattgtatataaacatgcacttcactacattggtaatacactaaaattgtggtccttttcctcttgtgaccaccacatgtctagtgattattttgtttatttggttgctacttacctagcacattgtaatgttccatgaatgctaatattaaattttgtaaaaataacttatttataaataatttttaaagagaaaaatctcatataatttgtcataacctttcaataaataaaactgttaaatcatggcctgatatcatcttaaaaaaaaatctcagaatctgaaataagccctaaatttctccccaaaatcaagactcttgagagcatcataggtctccttgtgctaccttttactccctataaatagaaatccaagtatactttaatatgtgtatattttttggttttcctacagcttctccccatctttcaaaagaatcacgaaatttcttctgcaccttggctattctgtttaaatctgataatcagttgatctcaggtttttcactgtacattactttgcagatatggacagcctttacaaaaataatttttaaatgcttaattattttaatttgttctttaaggtaaccttcagttattttgaattaatttaacttctcaattatgccaaagttgcacttgcatgaaataaatattattttgtccttgtatagactggaacagtaataaatttatctgaatt

SEQ ID NO: 48566 - DNA, 1575 bp, Homo Sapiens
ttgttaatgacaagctattctatgcgctccacggtggtgtctcgctatgcccacaccttggtcacctctgtcctgtttaatccacatgctgaagcccatgaagccatctttgacctggatctgcctcatcttgcctttatctccaatttcactatgaccatcaacaataaagtctacattgcagaagtcaaagagaagcaccaggcaaagaaaatctatgaagaagcccatcagcagggaaagacagctgctcatgtaggcatcagggaccgggaatcagagaagttccgcatctccaccagcctggcagcaggcacagaggtgactttttccctggcctatgaggaactgcttcagcggcaccagggccagtaccagctggtggtgagcctgaggcctggccaattggtgaagaggctgagcatagaggttacagtgtcagaaaggacaggcatctcctatatttacgatgactatttcattcactactttgcccccagaggccttccacctatggagaagaatgtggtttttgttattgacgtaagcagctccatgtttggtaccaagatggaacagactaaaacggccatgaatgtgatcctcagtgaccttcaagccaatgactacttcaacatcatctccttttctgacacagttaatgtttggaaagctggaggctcaatccaggccaccatccagaatgtccacagtgccaaggactacctgcattgcatggaagccgatggctggacagacgtcaactcagctctgctggcagctgcttcagtgctgaaccatagcaaccaggagcctgggaggggccccagtgtggggaggatccctcttatcatcttcctgacggatggggagcccacggccggcgtgacgacccccagtgtgatcctctccaatgtccgtcaggcgctaggccacagggtatcccttttcagcttggcctttggggatgatgctgactttacactgctgcgccgcctgtccctggaaaaccggggaatagcccggcgcatatatgaggacactgatgcggccctacagctgaagggcctctatgaggagatctccatgcctctgctggcagatgtgcgtctgaactacctgggtggcttggttggggcctccccttgggccgttttccccaactactttggtggctctgagctggtggtggcaggacaggtgcagccaggcaaacaggaactgggcatccacctggcagcccgtggccccaaggatcagcttcttgtggcccaccacagtgaaggggccaccaacaacagccagaaggcctttggttgcccaggggagccagcccccaatgtggcccacttcatccgccgcctctgggcctatgtcaccattggagaactgctggatgcacacttccaagctcgtgacaccaccactcgccacctgctggctgccaaagtcctcaacctgtcccttgaatacaactttgtcacacctctgacttcactggtcatggtgcaacccaaacaggccagtgaggagaccaggagacagacttccacctctgctgggccagacaccatc

SEQ ID NO: 48567 - DNA, 621 bp, Homo Sapiens
atgaatgtcaccccagaggtcaagagtcgtgggatgaagtttgctgaggagcagctgctaaagcatggatggactcaaggcaaaggcctcggccggaaggagaatggtatcactcaggctctcagggtgacactgaagcaagacactcatggggtaggacatgaccctgccaaggagttcacaaaccactggtggaatgagctcttcaacaagactgcggccaacttggtagtggaaactgggcaggatggagtacagataaggagcctttctaaggagaccacccgttataatcatcccaagcccaacttgctgtatcagaagtttgtgaagatggctacattgacttcaggtggagagaagccaaacaaagacttggagagctgcagtgatgacgacaaccaggggtccaagtccccaaagattctgactgatgagatgctgctccaagcctgtgaggggcgaacagcacacaaggctgcccgtcttgggatcacaatgaaggccaagcttgctcgcctagaggcccaggagcaggccttcctggctcgtctcaaaggccaggaccctggggcccctcaactgcagtcagagagcaagccccccaaaaaaaagaaaaag

SEQ ID NO: 48568 - DNA, 1056 bp, Homo Sapiens
atggttcgactgaccttggatctaattgccagaaacagcaatcttaaaccccgaaaagaagaaaccatttcacagtgcctgaagaaaataactcatataaatttttcagacaaaaatatagatgcaattgaagacctctctctttgcaaaaatcttagtgttttatatttatatgataattgtattagtcaaatcactaacctgaattatgccacaaatctgacccacttgtacctacaaaacaattgtatttcatgtatagagaacctcaggtcattaaagaaactggaaaaactgtatctgggaggcaattacattgctgtcatagaaggtttagaaggattaggagaactaagagagcttcatgttgagaatcagaggcttccccttggggaaaagcttctgtttgatccaagaactcttcattctctggcaaaatccctctgtatattgaatatcagcaataataatattgatgacattacagacttagaactactagagaatcttaatcagctcatagccgttgacaaccaacttctgcatgtgaaggatttggagtttttactgaacaagttgatgaagctgtggaaaattgatctaaatggaaatcctgtttgtctcaaaccaaaatacagggacagactgatattggtgtccaaatcactggaatttcttgatggaaaagaaattaaaaatatagaaagacaattcctaatgaattggaaagcatccaaagatgccaagaaaatcagcaaaaaaaggagcagtaaaaatgaggatgcaagcaattcactcataagtaacttcaaaacaatgcatcatatagttcctgtttattacccacaggtgggtaagccaaaattagcctttttctctgaaatacagagataccctgtaaatgcaaatgcatctaaagttcctgagaagattacactaaaattatttaagagatggggtaggaatctctctttgaagcaatctgaaagcttgctgacaaaaaatgatgtgcatgaacctcacctcttccataacccagaagaaaaagaaaatttg

SEQ ID NO: 48569 - DNA, 1921 bp, Homo Sapiens
ctcactgcctccagcttccagacttttctgtcctgtctcttggcccctgacagccaagtgaggcctgagtgaaggccccacattgacccctcttcacttgtaatctcttttaatggagtccgggagagtcacgatggctgtcctcttggggacaaggagtcttggggagaatcgtggggtctgcctctttcacgcgcctgtctcccacttaaccccctcccccaactcccgcacaggccctgccccacgcggctccggacacggaattgcagctgcggtagagatgagatgtagcaacagttctgcagtagtgtggtggtgacttgggtgtgttctcctcctgacattcacctgcacctttttctgcgcttttcagtatgtatgtatttaatagtatcactcaacaaaaaggagtttatcaggccgggtggctggctcacgcgggaggagagcttgagccctgcaggagttcgagaccaggctgggcaacattgggagaccccccccaccaatctctacaaaaaaataaaaaataaagtttataggctgggcgaggtggctcacgcctgtaatctcagcactttgggaggccgagatgggaggatcgcttgagcccaggagttcgagattaacctgggcaacataatgataccctgtctcttaaaaaaaaaaaattatcaaataacagcaccagaggcatagctgtggttatgatggtcaccaagaaggctactgacgtggagggtgaggcggaggagggctaggtctttctctgtgcactgggagccactctcctgaagccccaactgcgtcttcatctttgtggccccagagcccagaccacagcctgcagcacaggacgccccgggaagaattaatgcagccggagagaccagtccacctcctcgtgtcgcgtgtccgcgtggggttgtgggtggtcagggagaggtagggtggatgacccaggaaggccgccctcccctggctctgtctaggaacaatccttgccccaggcctggtccttagaaggcaagacagcccccttccagctgggggatcaatctgctgttggctgcgccagggtgcggctccctcgggtctggcctggtcgtggatccagttccttcacagctgcggcctccccgggtccattaacgaaggtggggaagggcggagaaagggtcggagtctgggaggagagcagctgcgggcgcgccagggcgctgacagtctggctcttggaggtaagatgggcgtggctgatcccgaactccgcctgcgtttgcagaagcgaagggaaccgagcgagcggagctgagctcgggtaggccgcgcgaggtccctcctctccgggcgtccgtgcgcctagctctgcgctgggagcctcgcgccctttgacagcagttagttgctgactcggatgcagagagtcggtaacaccttctccaacgagagccgggtggcatcccggtgtcccagcgtgggccttgctgaacggaaccgggtggccacaatgccggtgcggctgctcagggacagtccagcggctcaggaggacaatgaccatgccagagacggtttccaaatgaagctggatgcccacggcttcgccccggaggaactggtggtgcaggtggatggccaatggctgatggtgaccggacagcagcaactggacgtcagggacccggaaagggtcagttaccgcatgtcacagaaggtgcaccggaaaatgctcccgtccaacctgagtcctaccgccatgacctgctgcctgaccccctccgggcagctgtgggtcagaggccagtgtgtggcgctggccctccctgaagcccaaacaggaccgtccccgagactcgggagcctcggctctaaggcttccaacctgacccggtaaacaaacgacgcgatgtgcagc

SEQ ID NO: 48570 - DNA, 216 bp, Homo Sapiens
tacgtgcgcgcccgggagctgcacactcttgaagtgaccggcctggagacggttgcccagagcaaggcccatgtagcatccctggagggcctcatccctgaagataaggttgtgcttctggcaggttctcccttacagaatgaagccaccctgggtcagtgtggggtggaagccctgacaaccctggaagtggttggccgcaggctaggaggtgag

SEQ ID NO: 48571 - DNA, 2653 bp, Homo Sapiens
atggatgtctctctttgcccagccaagtgtagtttctggcggattttcttgctgggaagcgtctggctggactatgtgggctccgtgctggcttgccctgcaaattgtgtctgcagcaagactgagatcaattgccggcggccggacgatgggaacctcttccccctcctggaagggcaggattcagggaacagcaatgggaacgccagtatcaacatcacggacatctcaaggaatatcacttccatacacatagagaactggcgcagtcttcacacgctcaacgccgtggacatggagctctacaccggacttcaaaagctgaccatcaagaactcaggacttcggagcattcagcccagagcctttgccaagaacccccatttgcgttatataaacctgtcaagtaaccggctcaccacactctcgtggcagctcttccagacgctgagtcttcgggaattgcagttggagcagaactttttcaactgcagctgtgacatccgctggatgcagctctggcaggagcagggggaggccaagctcaacagccagaacctctactgcatcaacgctgatggctcccagcttcctctcttccgcatgaacatcagtcagtgtgaccttcctgagatcagcgtgagccacgtcaacctgaccgtacgagagggtgacaacgctgttatcacttgcaatggctctggatcaccccttcctgatgtggactggatagtcactgggctgcagtccatcaacactcaccagaccaatctgaactggaccaatgttcatgccatcaacttgacgctggtgaatgtgacgagtgaggacaatggcttcaccctgacgtgcattgcagagaacgtggtgggcatgagcaatgccagtgttgccctcactgtctactatcccccacgtgtggtgagcctggaggagcctgagctgcgcctggagcactgcatcgagtttgtggtgcgtggcaaccccccaccaacgctgcactggctgcacaatgggcagcctctgcgggagtccaagatcatccatgtggaatactaccaagagggagagatttccgagggctgcctgctcttcaacaagcccacccactacaacaatggcaactataccctcattgccaaaaacccactgggcacagccaaccagaccatcaatggccacttcctcaaggagccctttccagagagcacggataactttatcttgtttgacgaagtgagtcccacacctcctatcactgtgacccacaaaccagaagaagacacttttggggtatccatagcagttggacttgctgcttttgcctgtgtcctgttggtggttctcttcgtcatgatcaacaaatatggtcgacggtccaaatttggaatgaagggtcccgtggctgtcatcagtggtgaggaggactcagccagcccactgcaccacatcaaccacggcatcaccacgccctcgtcactggatgccgggcccgacactgtggtcattggcatgactcgcatccctgtcattgagaacccccagtacttccgtcagggacacaactgccacaagccggacacgtatgtgcagcacattaagaggagagacatcgtgctgaagcgagaactgggtgagggagcctttggaaaggtcttcctggccgagtgctacaacctcagcccgaccaaggacaagatgcttgtggctgtgaaggccctgaaggatcccaccctggctgcccggaaggatttccagagggaggccgagctgctcaccaacctgcagcatgagcacattgtcaagttctatggagtgtgcggcgatggggaccccctcatcatggtctttgaatacatgaagcatggagacctgaataagttcctcagggcccatgggccagatgcaatgatccttgtggatggacagccacgccaggccaagggtgagctggggctctcccaaatgctccacattgccagtcagatcgcctcgggtatggtgtacctggcctcccagcactttgtgcaccgagacctggccaccaggaactgcctggttggagcgaatctgctagtgaagattggggacttcggcatgtccagagatgtctacagcacggattattacagggtgggaggacacaccatgctccccattcgctggatgcctcctgaaagcatcatgtaccggaagttcactacagagagtgatgtatggagcttcggggtgatcctctgggagatcttcacctatggaaagcagccatggttccaactctcaaacacggaggtcattgagtgcattacccaaggtcgtgttttggagcggccccgagtctgccccaaagaggtgtacgatgtcatgctggggtgctggcagagggaaccacagcagcggttgaacatcaaggagatctacaaaatcctccatgctttggggaaggccaccccaatctacctggacattcttggctagtggtggctggtggtcatgaattcatactctgttgcctcctctctccctgcctcacatctcccttccacctcacaactccttccatccttgactgaagcgaacatcttcatataaactcaagtgcctgctacacatacaacactgaaaaaaggaaaaaaaaagaaagaaaaaaaaa

SEQ ID NO: 48572 - DNA, 1224 bp, Homo Sapiens
ccgggctcgccaggagctcatccagcagcaggccgcaggggagtgcagaccagggcgccggctcctggagcgcctgggagggcgccgggatgccttgcatctgcccctgccgcgcggaggcgtccgggggcgcgggctggggaggtggagctgccccggcttggggttcccacgccgccccggcgacctggggaccccggccccagccccaccacggactcccctgggacgtgggtggcgcaagcaccccttggccctgcggccccgcttgagcgggcccaggctgtgccaccgcgcaggggcccggcaggccgtcgcgctgcgggtcccggtcctcccggcttttgcccgggtgcggaggccaccgaggagcctgagggtgggagagcgccccgtccggaggagccggggcggcgtaggcgaaatccccgcgcgccggggcaggttgggagatcccctctgccggcgcggcctggctgggctgcagcgcgggggcggccctcgctgcctggctcacgaaagccccctgcgcgcagggcacgtggggtgcgggaagccccgttccccacgcgccggtgtgggcgaaggcgacccacgagggagcagggtgacccccgccgggggccgcgctgcacaggccgcctgcctgcgcgggcgccctgccaccctgtcccgggtgcctggcccttcgattctgaaaccagatctgaatcctggactccgggaggcccgtctctctggccagctcctcccgggcggcgatgcctggaaagcgatccttctcaaaggctcggaggagcagggcggtctgggatccggtgacggcggtccgctttcgccggccttctggcgggccgcgtctcccgggccagggccgagattcccgccggtgctgcctcagctggcgtgacctctcattctgaaaccaaatctggaccctgggctccggaatgccgatggcctgggccagccgttctctggtggcgatgcccgggtacgggttccgctcaaagcaggctcgcagggcctcgctttggctcggggtccaaacgagtctccgtcgccgtcctcgtccccgggcttccgcggggagggtgctgtccgaaggtgtcgggagggccatcgcggtgagccccggccgcaatttcacggacggacgcgggcagagagaggccggcgggctcccgtgcacctcagccggactgtgcactgcggcaggtgcag

SEQ ID NO: 48573 - DNA, 501 bp, Homo Sapiens
atgacagccgggaccgtggtcatcaccgggggcatcttggcgactgtgattttgctctgcatcatcgctgttctgtgctactgccggctccagtactactgctgcaagaaggacgagtcggaggaggacgaggaggaaccagacttcgccgttcactcgcacctgcccccgctgcactccaaccgcaacctggtgctgaccaacgggccggcgctctaccccaccgcctccacctccttcagccagaagtccccgcaggcccgcgccctctgccgcagctgctcccactgcgagccccccaccttcttcctgcaggagccgccggaggaggaagaggacgtgctgaacggcggggagcgcgtgctctacaagagcgtgagccaggaggacgtggagctgccccggggggctttcgggggcctgcaggcgctcaaccccaaccgcctctcagccatgcgggaggccttcgccaggagccgcagcatcagcaccgacgtgtga

SEQ ID NO: 48574 - DNA, 732 bp, Homo Sapiens
ccccagggccagtgagggccctgcgttccgtggcgccccctggagggaggaaggggaactgtatctgagagagagcagccaattgggtccgctgactccggccgggttcccgtgccgcgtccaacacccctcactccctgtctcactcccccacggagactcaatttactttccatgtccacatccccagtgcttgcggaagatatcccgctaagagagagacatgtcaaaggggctgctgctgttgctgctgctgagcatgggcgggacatgggcatccaaggagccgcttcggccacggtgccgccccatcaatgccaccctggctgtggagaaggagggctgccccgtgtgcatcaccgtcaacaccaccatctgtgccggctactgccccaccatgacccgcgtgctgcagggggtcctgccggccctgcctcaggtggtgtgcaactaccgcgatgtgcgcttcgagtccatccggctccctggctgcccgcgcggcgtgaaccccgtggtctcctacgccgtggctctcagctgtcaatgtgcactctgccgccgcagcaccactgactgcgggggtcccaaggaccaccccttgacctgtgatgacccccgcttccaggcctcctcttcctcaaaggcccctccccccagccttccaagcccatcccgactcccggggccctcagacaccccgatcctcccacaataaaggcttctcaatccgca

SEQ ID NO: 48575 - DNA, 1146 bp, Homo Sapiens
ggcggcaacatgtctgtggctttcgcggccccgaggcagcgaggcaagggggagatcactcccgctgcgattcagaagatgttggatgacaataaccatcttattcagtgtataatggactctcagaataaaggaaagacctcagagtgttctcagtatcagcagatgttgcacacaaacttggtataccttgctacaatagcagattctaatcaaaatatgcagtctcttttaccagcaccacccacacagaatatgcctatgggtcctggagggatgaatcagagcggccctcccccacctccacgctctcacaacatgccttcagatggaatggtaggtgggggtcctcctgcaccgcacatgcagaaccagatgaacggccagatgcctgggcctaaccatatgcctatgcagggacctggacccaatcaactcaatatgacaaacagttccatgaatatgccttcaagtagccatggatccatgggaggttacaaccattctgtgccatcatcacagagcatgccagtacagaatcagatgacaatgagtcagggacaaccaatgggaaactatggtcccagaccaaatatgagtatgcagccaaaccaaggtccaatgatgcatcagcagcctccttctcagcaatacaatatgccacagggaggcggacagcattaccaaggacagcagccacctatgggaatgatgggtcaagttaaccaaggcaatcatatgatgggtcagagacagattcctccctatagacctcctcaacagggcccaccacagcagtactcaggccaggaagactattacggggaccaatacagtcatggtggacaaggtcctccagaaggcatgaaccagcaatattaccctgatggaaattcacagtatggccaacagcaagatgcataccagggaccacctccacaacagggatatccaccccagcagcagcagtacccagggcagcaaggttacccaggacagcagcagggctacggtccttcacagggtggtccaggtcctcagtatcctaactacccacagggacaaggtcagcagtatggaggatatagaccaacacagcctggaccaccacagccaccccagcagaggccttatggatatgaccag

SEQ ID NO: 48576 - DNA, 501 bp, Homo Sapiens
atggcggcctatccggagagctgcgtggacactacggtgctggacttcgtcgcagacctgtccctggcctccccgagacgccctctcctctgcgacttcgcacccggggtctccttgggggacccagcccttgcgctccgagagggaagacccaggaggatggcgcggtttgaagagggggacccagaagaagaggagtgcgaagtggaccagggggacggagaagaggaggaggaagaggagcgcggaagaggtgtctccctattaggccgccccaagaggaaaagggtgatcacctacgcccagcgccaggccgccaacatccgcgaaaggaagcggatgttcaacctcaacgaggcctttgaccagctgcggaggaaggtgcccacgtttgcttacgagaaaaggctgtcccggatcgagaccctccgcctggccatcgtctatatctccttcatgaccgagctcttggagagctgtgagaagaaggaaagcggctga

SEQ ID NO: 48577 - DNA, 579 bp, Homo Sapiens
atgcaggccatcaagggtgtggtggtgggagacggagctgtaggtaaaacttgcctactgatcagttacacaaccaacgcatttcctggagaagatatccctactgcctttgacaattattctgccaatgttatggtagatggaaaactggtgaatctgggcttatggaatacagctggacaagaagattatgacagattacgccccctatcctatccgcaagcagatgtgttcttaatttgcttttcgcttgtgagtcctgcatcatttgaaaatgtccttgcaaagtggtatcctgaggtgcagcaccactgtcccaacactcccattatcctagtgggaactaaacttgatcttagggatgataaagacaggatccagaaactgaaggagaagaagctaactcccatcacctatccgcagggtctagccatggctaaggagatgggtgctgtaaaatacctggagtgcttggccctcacaaggcgaggcctcaagacagtgtttgacgaagcgatccgagctgtcctctgcccacctcccgtgaagaagaggaagagaaaatgcctgcagttgtaa

SEQ ID NO: 48578 - DNA, 555 bp, Homo Sapiens
atggccgaccacctgatgctcgccgagggctaccgcctggtgcagaggccgccgtccgccgcggccgcccatggccctcatgcgctccggactctgccgccgtacgcgggcccgggcctggacagtgggctgaggccgcggggggctccgctggggccgccgccgccccgccaacccggggccctggcgtacggggccttcgggccgccgtcctccttccagccctttccggccgtgcctccgccggccgcgggcatcgcgcacctgcagcctgtggcgacgccgtaccccggccgcgcggccgcgccccccaacgctccgggaggccccccgggcccgcagccggcgccaagcgccgcagccccgccgccgcccgcgcacgccctgggcggcatggacgccgaactcatcgacgaggaggcgctgacgtcgctggagctggagctcgggctgcaccgcgtgcgcgagctgcccgagctcttcctgggccagagcgagttcgactgcttctcggacttggggtccgcgccgcccgccggctccgtgagctgctga

SEQ ID NO: 48579 - DNA, 321 bp, Homo Sapiens
gcaactcttaaggatcagctgattcataatcttctaaaagaagaacagaccccccataagattacagttgttggggtttgtgctgttggcatggtctgtgccatcagtatcttaattaaggacttggcagatgaacttgcccttgctgatgtcgtggaagacaaattgaaaggagagataacggatctccaacatggcagccttttccttagaacactaaagattatctctggcaaagactataatgtaactgcaaactccaagctggtcattatcatgtctggggcaggtcagcaagagggagaaagccatcttaaatag

SEQ ID NO: 48580 - DNA, 528 bp, Homo Sapiens
gggctggctaagctgcaggttgtgcctgagctcacggacacgaggaagaagggcgaccgtgtcctggacagcccagctcgaggctgctcttcagccccagcccctggttcccgcagcggctgcggtggcagtggtgggggagcaggcatggcacccggagcactggagcccaatgcagggcccttccccccagctccaaatccagcatccctccccgtgcctagccctcgccaggctgctggccccatcgctgggaaggagtggtttgacccctcaccactgagaggagtaaggtgtactcttgtcaagcatgactccgagcggcacttcttccacaccgcgcagctgcctgtgctggcaggggcctcctgcggccggaacgtcccctgcatccccaaccacacctggcacaacaccatggctgaggtgcgcttccagctgcaccagcagcccacacgcctcctgagcaccactaccagctaccccaagcccgtctataccagctaccccaagaccgtctataccagc

SEQ ID NO: 48581 - DNA, 730 bp, Homo Sapiens
atggcttcccaaaaccgcgacccagccgccactagcgtcgccgccgcccgtaaaggagctgagccgagcgggggcgccgcccggggtccggtgggcaaaaggctacagcaggagctgatgaccctcatgatgtctggcgataaagggatttctgccttccctgaatcagacaaccttttcaaatgggtagggaccatccatggagcagctggaacagtatatgaagacctgaggtataagctctcgctagagttccccagtggctacccttacaatgcgcccacagtgaagttcctcacgccctgctatcaccccaacgtggacacccagggtaacatatgcctggacatcctgaaggaaaagtggtctgccctgtatgatgtcaggaccattctgctctccatccagagccttctaggagaacccaacattgatagtcccttgaacacacatgctgccgagctctggaaaaaccccacagcttttaagaagtacctgcaagaaacctactcaaagcaggtcaccagccaggagccctgacccaggctgcccagcctgtccttgtgtcgtctttttaatttttccttagatggtctgtcctttttgtgatttctgtataggactctttatcttgagctgtggtatttttgttttgtttttgtcttttaaattaagcctcggttgagcccttgtatattaaataaatgcatttttgtccttttttagacaa

SEQ ID NO: 48582 - DNA, 824 bp, Homo Sapiens
gcacatcccctggattaagtctcaccagcctcaggactccctcttacacccaccgaccccagcaactgctctttctgtgccctcccaccctgcccacggggctttaatgctgcctacgaatgcttaccataggccagcatctgctctcctctgcctgtcccggtcctccttgccctgccagctggggccttcccctaaggcaagggtagcggtccgttcatccttgtgtccacagcacccagggcaggctcagtccatgggggatgggggtgatgactgtctgccggaggaagcagtaatgtttctcagaggctcccaaccttatattggttcccctcttgactttggaagactccaggttctacccaggaatcagctactggagcagcttctcctgcccagttctacagcttgacttttacaacaatgccaagattttacagaaggtgggtggggaggaaaaggcccagaaggcctgctaagatcagcgagggaggctctgccaacaggaaggaaagttctgagcaaaagaggggtagggagggccgggtgcgatggctcacgcctgtaatcccagcactttgggaggccgaggcaggcagatcacgaggtcaggagatcgagaccatcctggctaacacggtgaaaccccgtctctactaaaaatacaaaaaattagccgggcgtggtggcgggcgcctgtagtcccagctactcaggaggctgaggcaggagaatggcgtgaacccgggaggcggagcttgcagtgagccgagatcgcgccactgcactccagcctgggtgacagagcgagactctgtctc

SEQ ID NO: 48583 - DNA, 303 bp, Homo Sapiens
atggaaggctgcctccgaatcgaggaagccttgaccttgggaggggcctgccttttcgctgggcttgcctttctctgggcagcgttcgctcagcacttcagtgcggccgattcccctgggactgaattcacaccagccacgacgacttcccggctacttcacgttctctatgtttgcagctgttctttggtggcagaaaaagatgatttttcttccccccactcccattcccttttgttagtttctctccctgaaccacattttgagctgagtgaaggtctcaggttggcctttagagggagt

SEQ ID NO: 48584 - DNA, 747 bp, Homo Sapiens
acttccgccctcgcgggactggctagggcgtttgaccgccggcggtgaaggggaggcggtgggcgtcttggagaacagagcgagatggagaagcgaggccgaggcgtgaagtcgagccccatccagaccccgaaccagacccctcagcaggctccggtgacgcctaggaaagaaaggaggcctagcatgttcgagaaggaggcatatacacagattttaagagaaagactgagagagtcaattcacaatgttcagtatgtggagcctccttttgatgactcaattgctgatataggtaaagaatggaagagtgccctggcaaaattaaagtttgctaattcatatagaatggagccattgaagaaattccaagctcattcagtagaaactaaagtccagcagatactaacagaaagtcttaaagatgtcaaatatgatgataaagtattctctcacttgtcacttgaattggcagaccgcatactgttagcagtcaaagaatttgggtaccaccgttataagttcattataaaagtattatttattcaaaagactggccaagcaataaatattgccagcagatggatctgggacattgcatgggacagctgggtcgcagctaaacacgaagcagaatcctacgtggcactggtcttggtgtttgccctttattatgaatagctcattacaggtactaaggattgtttacttccgaacttttcaaaaataaatgaaatttacatattt

SEQ ID NO: 48585 - DNA, 895 bp, Homo Sapiens
aggagtcatgaggctgtggccatgggtgctggtgtgggtgtggctggctgcactaggggccatagaaactgggtcccaagtcagcttccgcctcgagagataaaggcaggggtcagcttggctgttgtcacagagtttgcttgggtcctagcacccagacccaagcgtgccacggcgtcagccctggggacagagtctccgcgcttcttagacagacctgacttcttcgattatccggactcagaccaagccaggctgctggctgtggcccagtttattggagagaaacccatcgtgttcattaactcaggttccagccccgggctcttccatcacatcctggtgggcttgctggtggtggcgttcttctttctccttttccagttctgcacccacataaacttccagaaaggggcctaaagagccggacaagggctctggactcaacctgagcacccacacccacctcctctcctgttgatgagcaaaagttccctgctttcctcctccctgactgcccagcgagcagctggggatcctgtcccctctgtttcccatggcccaagccccccacctcctcccttcccagccccaaagaacttggtggcaagggccttggtggcgttcacgcagatcgtcttttattagcggtctgtaaagcacctcccagggtcccccgaccccagattggaggaagccttgagaggtcagtagcaccagggacatggcagggcccgagggcgcgatgtgcagccgatggtgagggactgggcgccctcgcctgcccccggggttgtcagcactgggaaggcttgggggtagcagccacctccttcccccaacccaacagactagttcaaatttgggtaaataaataaaataaataagattcctc

SEQ ID NO: 48586 - DNA, 6658 bp, Homo Sapiens
gggaggagccgaacccggcgccatccgccgccatcctcccccgccccaccgccatcccgtcccggggagcccctaggcccgggtcccggatccccgcgcacccggccaggctctggcacgttttgggggaggtgcctgcaggacccaacatactcaatgagcttccagcgcaatgtccgatcgctcggggccgactgccaagggaaaggatggaaagaagtattcctcgctcaacctgtttgatacgtataagggcaagtccttagagatccagaaacccgctggcattttcgaccctctctccgtcttgttctccagttgcccctcgccatggcctgcagagtctcgggaaagttgccattgcccggcgtatcctccagccaaccttccaagcctgaaagccgagaacaaaggcaatgaccccaatgtctcactagtgccaaaagacggaacaggatgggcaagcaaacaggagcagtccgaccccaagagttccgatgcctcaaccgctcagccgccggaatcgcagccactgccggcttcacagacgcctgcctccaaccagccgaaacgacccccagcagcccccgagaacactcctttggttccaagcggggtaaagtcctgggcacaagccagcgtcacccatggagcacatggagatggtggaagggcatcaagcctactgtcacgattctctcgagaggaatttccgaccctgcaggcggctggcgaccaggacaaggctgccaaggaaagggagtctgccgaacagtcgtctgggcccggaccaagcctccgcccccaaaattctacaacttggagggacggaggtgggcgtggccctgatgagctggagggcccggactccaaacttcatcatggtcatgatccccggggtgggctacagccttcaggcccaccccagttccctccctaccgcggaatgatgccgcctttcatgtatcccccatatctcccgttccctccgccctatggaccccaggggccttaccgataccccactcctgatgggcccagccgttttccccgtgtggcgggcccccgaggctcagggccaccaatgcgcttagtagagcctgtgggtcgtccctctattctcaaagaggataatctcaaagagtttgatcagttggatcaggagaatgatgatggttgggcaggggcccatgaagaggttgactacactgaaaagctcaagttcagcgatgaggaagatgggcgagactctgatgaggagggagctgagggccacagggattcccaatcagcttctggtgaggaacggccccctgaagcagatggcaaaaagggcaactcccccaacagcgaaccgcccactcctaagacggcctgggcagaaacctctcggcctccagagacagagccgggacctcctgccccaaagcctcccctacccccacctcaccggggccccgccgggaactggggcccccctggggactacccagatcgtgggggtcctccctgcaagcccccagcacctgaagatgaggatgaggcatggcggcagcgacgaaagcagtcgtcatctgagatttccctggcagtggagcgggcccggcgacggcgagaagaagaggagcggcgcatgcaagaagagcgccgggcagcctgtgctgagaagctcaagcgactcgatgaaaagtttggggcacctgacaagcggctcaaagcagagcctgctgccccacctgctgccccttctaccccagctccaccacctgcagtccctaaagaactccctgcacctccagctccacctccagcatcagccccaacaccagagaaagaacctgaagagccagcacaggcccctcctgcccaatctactcctactccaggtgtggctgcggctcccactctggtgagtggtggtggcagtaccagtagcaccagcagtggcagcttcgaagccagcccagtggaaccacaactgccctcaaaagagggtcctgaaccaccagaagaggttcctcctcctaccacacccccagttccaaaggtggaacccaagggtgatgggattggtcccacccgccagccccctagtcagggcttgggctaccccaaatatcagaagtcgttgcctcctcgtttccagcggcagcagcaggagcagctcctgaagcagcagcagcagcaccagtggcagcagcatcaacagggctctgcccctcctaccccagtgcccccatcaccaccacagcctgtgaccctgggggctgtgccagctccacaggctccacccccgccccccaaggccctgtacccaggtgctctgggccggcccccacccatgcccccaatgaactttgatccccgatggatgatgattcctccttatgtggacccccggctcctccagggtcgtccccctctagacttctaccctcctggtgtgcatccctctggcctagttccccgagagcgttcagacagtgggggctcaagctcagagccatttgaccgtcatgcacctgctatgttacgggaacggggcactccaccggtggatccaaagttggcctgggtgggagatgtcttcaccgccacacccgctgaaccccgcccacttacctcacctctgcgccaggctgcggatgaggatgacaaggggatgaggagcgagactcctccagtacctcccccaccaccctatctggccagttatccaggctttcctgagaatggagcccctgggcccccaatctctcgctttcctctggaggaaccagggccccgtccactcccctggcccccaggcagtgatgaagtggccaagatacaaactccaccacccaagaaggagccccctaaggaggagactgcacagctgacggggccagaagcaggccgaaagcctgcccgcggagtcgggagtggaggccagggccccccaccaccacgcagagagagtcgcacagagacccgctggggccctcgtccagggagcagtcgtcgtggaatccctccagaggagccaggggccccaccccgccgggctgggcctataaagaaacctccaccacctacaaaagtagaagagctgcctcccaagcccctcgaacagggggatgaaacccccaaacccccaaagccagacccactcaagataaccaaggggaagctagggggccccaaggagaccccacccaatggaaatctttcccctgccccaaggcttcggagggactattcgtatgaaagagtgggtcctacctcttgccggggtcggggccgaggcgagtattttgccagagggaggggttttcgggggacctatgggggacgagggcggggagaagccgggaattccgcagttaccgagagtttcgaggagatgatgggcgtggaggtgggacagggggaccaaaccaccctcctgctccccgaggccgcactgccagcgagacacggagcgagggttcagagtatgaggaaatccccaagcggcgccggcagcggggctcagaaacaggcagcgagacccatgagagtgatctggctccttcagacaaggaggctcccacacccaaggagggaacactcacccaggtccctctcgctcccccaccaccaggagccccaccttcaccagccccagcccgcttcactgcccggggtgggcgagtcttcactcccagaggggatctcgccggggccgaggaggagggagcctcctcaagtttgcccaggctggagccctccagccaagtctctggctcccaagaaacctcccacaggccctttgccaccaagtaaggagcctttgaaagagaagttgatcccagggcctctgtcccctgtggcgcgcggaggcagcaatggaggtagcaatgtgggcatggaagatggggagcgaccccgaaggaggcgacatgggagggctcagcagcaggataaaccgcctcgtttccggaggctgaagcaggaacgggagaatgccgcaagggggtctgagggcaagccctccctaacccttccagcctccgctcctggacctgaggaggccctcacaacagtcacagtggccccagcacctcgccgggcagctgccaagtctcctgatctgtcaaaccagaactcagaccaagccaatgaggaatgggagactgcatcagagagcagtgacttcaccagtgagcgccgaggggacaaagaggcacccccaccagtactgctgacacccaaggctgtgggaactcctgggggaggtggaggtggagccgtaccaggtatttcagccatgtcccgcggagatctgagccagagagccaaggatttgagtaaacggagcttctcaagtcagcggccaggcatggaacggcagaatcggcgccctggcccagggggcaaggctggcagcagtggcagcagcagtggaggaggcggtgggggtcctggaggaaggaccgggccaggacgaggcgacaagaggagctggccctctcccaagaaccgaagtcgtcctccagaggagcgtcccccggggcttcccctgcctcccccacctcccagcagttctgctgtcttccgcctggaccaagttatccacagcaaccctgctggcatccaacaggctctggcccagcttagtagccgtcaagggagtgtaactgcaccagggggtcatccaaggcacaagcctgggcctccccaagcccctcagggcccctctcctaggcccccaacccgatacgagccccagagggtcaacagcggcctcagttctgacccccactttgaggagccggggccaatggtgagaggggtgggtgggactcctcgggactctgccggggttagtccctttccccctaaacgtcgggagcggcctcccagaaaaccagagctgctacaggaggaatctttgccacctcctcatagctctggattcttgggctctaagcctgagggcccaggccctcaggcagagtccagagatacaggcacagaggccctgacccctcacatctggaaccgtttacatactgccactagccgaaagagttaccggcccagctccatggagccttggatggagcccctgagtccttttgaggatgtggctggcacagaaatgagtcagtctgacagtggggtggacctgagtggggattctcaggtgtcatcaggtccctgcagccagcgaagttcccctgatggaggactcaagggggcagcagagggaccccccaagaggcctggaggctcctcacccctgaatgctgttccttgtgagggtccacctggctctgaacctcctaggagaccaccacctgccccccacgatggggacagaaaggagctgccccgggagcagcctctgccccctggccccattggcacagaacgatcacagcatacagaccgaggcacagagcctggccccattcggccatcccatcgacctggtcccccagtccagtttggcactagtgacaaggactcagacttacgcctagtggtaggagacagcttgaaagcagagaaggagctaacagcatcagtcactgaggccattcctgtatcacgagactgggagctgcttcccagtgctgctgcctctgctgagccacaatccaagaacctggattctgggcactgtgtcccggagcccagctcctcaggccagcgcctgtatcctgaggttttctatggcagtgctgggccttccagttctcagatctctgggggacatggactctcagttacatccaaacagtggaggcgccctgggacaccctcactgcacccttacagatcacagcccctatacctaccccccggcccagcccctccctcagcactgctctctggggtagctctcaagggccagtttctggatttctccacaatgcaagctacagagctggggaagttgccggctggaggagttctctaccctccaccttccttcctctactctccggctttctgccccagtcctttgcctgacacatcgttgcttcaggtacgccaggatctgccatccccttcggatttttattctactcctctgcagcctggtggccaaagtggctttctcccttcaggggctcctgcccagcagatgcttctacccatggtagactcacagctgcctgtggtgaactttggctccctgccgccagcaccacctcctgccccaccttccctttctctgttacctgtgggccctgctctgcagccccccagcctggctgtgcggcccccacctgctcctgctactcgggtgctgccttcacctgccaggcccttccccgctagcttggggcgagcagagctgcatccagtggaactaaagccgttccaggattatcaaaaactgagcagcaaccttgggggacctggatcatcacggactcccccaactggaaggtccttctctggcctcaattcccgtctcaaggccacgccttccacctacagtggagtcttccgcacccagcgcgtcgacctttaccagcaggcctccccaccagatgccctgcgctggatacctaagccttgggagcggacagggccgccacctcgagaagggccctcccgacgggcagaggagcctgggtcccgaggggacaaggagcctgggttgcccccaccccgctga

SEQ ID NO: 48587 - DNA, 1398 bp, Homo Sapiens
atgctgctcctgggcctgctgctgctgctgcccctgctggctggcgcccgcctgctgtggaactggtggaagctccggagcctccacctcccgcctcttgccccgggcttcttgcacctgctgcagcccgacctccccatctatctgcttggcctgactcagaaattcgggcccatctacaggctccaccttgggctgcaagacaagctggtgtctaggaactacccggacctgtccttgggagactactccctgctctggaaagcccacaagaagctcacccgctcagccctgctgctgggcatccgtgactccatggagccagtggtggagcagctgacccaggagttctgtgagcgcatgagagcccagcccggcacccctgtggccattgaggaggaattctctctcctcacctgcagcatcatctgttacctcaccttcggagacaagatcaaggacgacaacttaatgcctgcctattacaaatgtatccaggaggtgttaaaaacctggagccactggtccatccaaattgtggacgtgattccctttctcaggttcttccccaatccaggtctccggaggctgaagcaggccatagagaagagggatcacatcgtggagatgcagctgaggcagcacaaggagagcctcgtggcaggccagtggagggacatgatggactacatgctccaaggggtggcgcagccgagcatggaagagggctctggacagctcctggaagggcacgtgcacatggctgcagtggacctcctgatcggtggcactgagaccacagcaaacaccctctcctgggccgtggtttttttgcttcaccaccctgagattcagcagcgactgcaggaggagctagaccacgaactgggccctggtgcctccagctcccgggtcccctacaaggaccgtgcacggctgcccttgctcaatgccaccatcgccgaggtgctgcgcctgcggcccgttgtgcccttagccttgccccaccgcaccacacggcccagcagcatctccggctacgacatccctgagggcacagtcatcattccgaacctccaaggcgcccacctggatgagacggtctgggagaggccacatgagttctggcctgatcgcttcctggagccaggcaagaactccagagctctggccttcggctgcggtgcccgcgtgtgcctgggcgagccgctggcgcgcctggagctcttcgtggtgctgacccgactgctgcaggccttcacgctgctgccctccggggacgccctgccctccctgcagcccctgccccactgcagtgtcatcctcaagatgcagcctttccaagtgcggctgcagccccgggggatgggggcccacagcccgggccagagccagtga

SEQ ID NO: 48588 - DNA, 474 bp, Homo Sapiens
atgtctggatttctagagggcttgagatgctcagaatgcattgactggggggaaaagcgcaatactattgcttccattgctgctggtgtactattttttacaggctggtggattatcatagatgcagctgttatttatcccaccatgaaagatttcaaccactcataccatgcctgtggtgttatagcaaccatagccttcctaatgattaatgcagtatcgaatggacaagtccgaggtgatagttacagtgaaggttgtctgggtcaaacaggtgctcgcatttggcttttcgttggtttcatgttggcctttggatctctgattgcatctatgtggattctttttggaggttatgttgctaaagaaaaagacatagtataccctggaattgctgtatttttccagaatgccttcatcttttttggagggctggtttttaagtttggccgcactgaagacttatggcagtga

SEQ ID NO: 48589 - DNA, 1071 bp, Homo Sapiens
gccgtcctagacccctgcctagcccaggtcggtctccgcggacccacggacggacagacagacgggaggacggccagccgcgagcgcccgggcggcgggagggggcggggaggcgacggccgtggcgtgaggagcaggagcagctggctgctcttcgccatggcctggtggctcatcgccttcgcccacggtgacctggcccccagcgagggcactgctgagccctgtgtcaccagcatccactccttctcgtctgccttccttttctccattgaggtccaagtgactattggctttggggggcgcatggtgactgaggagtgcccactggccatcctgatcctcatcgtgcagaacatcgtggggctcatgatcaacgccatcatgcttggctgcatcttcatgaagactgcccaagcccaccgcagggctgagaccctcatcttcagcaagcatgcggtgatcgccctgcgccacggccgcctctgcttcatgctacgtgtgggtgacctccgcaagagcatgatcatcagcgccaccatccacatgcaggtggtacgcaagaccaccagccccgagggcgaggtggtgcccctccaccaggtggacatccccatggagaacggcgtgggtggcaacagcatcttcctggtggccccgctgatcatctaccatgtcattgatgccaacagcccactctacgacctggcacccagcgacctgcaccaccaccaggacctcgagatcatcgtcatcctggaaggcgtggtggaaaccacgggcatcaccacccaggcccgcacctcctacctggccgatgagatcctgtggggccagcgctttgtgcccattgtagctgaggaggacggacgttactctgtggactactccaagtttggcaacaccgtcaaagtgcccacaccactctgcacggcccgccagcttgatgaggaccacagcctactggaagctctgaccctcgcctcagcccgcgggcccctgcgcaagcgcagcgtgcccatggccaaggccaagcccaagttcagcatctctccagattccctgtcctga

SEQ ID NO: 48590 - DNA, 1743 bp, Homo Sapiens
atgaatttcctccggcgacgtctctctgacagcagcttcatggccaacctgcctaatggctatatgacggacctgcaacgcccagatagctccaccagctcacctgcttcccccgccatggagaggaggcacccccagcccctggctgcctccttctcctctccaggatccagcctttttagctccctctccagtgccatgaagcaggcccctcaggccacctcaggactgatggagcctccaggtccctccacgcccattgttcaaagacccaggatcctgttggtgatcgatgatgcccatacagactggtcgaagtatttccatgggaagaaggtgaatggagagattgagatccgagtggagcaggctgaattctcagagttgaacctagctgcctatgtgaccgggggctgcatggtggacatgcaggtcgtgagaaatgggaccaaagtggtgagcagatccttcaagccagacttcatcctggtccgccagcatgcctacagcatggccctgggggaagactaccgcagcctggtcatcggcctgcagtatggagggctgcctgctgtcaactctctctactccgtctacaacttctgcagcaagccctgggtgttctctcagctcattaagatcttccattccctgggtcctgagaagttcccgcttgtggagcaaacatttttccccaaccataagccaatggtcacagccccacacttcccggtggtagtcaagctgggacatgcccacgctggaatgggaaagatcaaagtggaaaaccagcttgacttccaggacatcaccagcgtggtcgccatggccaaaacctacgccaccaccgaggccttcatcgactccaagtacgacatccgcatccagaaaattggatccaactacaaggcttacatgagaacctccatctctgggaactggaaggccaacacaggctctgccatgctggagcaggtggccatgacagagaggtacaggctgtgggtggacagctgctcggaaatgtttggcggcctggacatctgtgccgtcaaggctgtccacagcaaggatggcagagattacatcatcgaggtaatggacagctcaatgccgctgattggagagcatgtggaagaggacagacagctgatggccgaccttgttgtctccaaaatgagccagctcccgatgccaggaggcacagcgccctcccccctcagaccttgggctccacagattaaatcagcgaaatccccagggcaagcccagctggggcctcagctaggccagccccagccacgcccacctccgcaaggaggccctcgccaagctcagtctcctcagccccagagatctggaagcccctcccaacagaggctctccccacaaggccagcagcccctgagcccccagtccggatctccacagcagcaaaggtcaccaggctctccgcagctatcccgggcatccagtggcagctccccaaaccaggcctccaagccaggtgccaccctcgcctcacagccccggccccctgtgcagggccgtagtacctcccagcagggtgaagagtccaagaagccagcaccaccccatccgcatctcaacaaatctcagtccctgactaacagcctcagcacatccgacacctcccagcgtgggaccccaagtgaagacgaggccaaggctgaaaccatccgcaacctgaggaagtcttttgccagcctgttctctgactaa

SEQ ID NO: 48591 - DNA, 1484 bp, Homo Sapiens
agacaattataaattcattaacccccagaactcttggctagacttcataaaggcaaaaactgtgtttgccctgttaactgctttatcccaccactagaatataagcttcctgaagacagaagacttctgttattttgttcacagttaccaagcatgcctactttgttaaatttatgaaagaactttaaagagtcagaggttccggttgagatcaagttgggagacacacccttgttcattctccttgagaagcagctattatcaacagaacattgacagaacctgtgtttggggaaaggactgatggctttgagtctaggttggaaagcacacaggaaccactgtggtctcctcttgcaggctctgcgaagcagtggtcttctcttgtttccctgtggccagtgtccctggagaggagctggaagctttttggaccctgagataaaggctttcctggaggagaacactgaagtcaccagcagtggtagcctcacccctgaaatccagttgcggcttttgacccccagatgcaaattctggtgggagagagctgacctgtggccccacagtgatccttactgggcaatctactggccaggaggccaagccctgtctaggtatcttttggataatcctgatgttgtcagaggaaaatctgtattagatcttgggagtggatgtggagctacagctattgctgctaagatgagtggggcatcaaggatcttggccaatgacatagaccctattgcaggaatggctattacactaaattgtgaattgaacagactgaatccttttcctattttaatccaaaacattttgaatttggaacaagataagtgggaccttgttgttcttggcgatatgttttatgatgaagaccttgcagatagtcttcatcagtggctgaagaagtgcttctggacctatagaactcgagtactgattggtgaccctgggcggccccagttcagtggacacagcattcagcatcacctgcacaaagtggtagaatattcacttttggagtctactaggcaggaaaacagtggactgacaacaagcacagtgtggggttttcagccttgagttgtcaaagtgcttccaagtatgaatatagtaatgtttggatctgactctaaaagttttctctataggagatactctccagtttaatgaatgtaattcttgttaaatggaaaatcttgtttttaaaatatgaaggtttagagttttgtttacttttgtcatgtaactggttctgtatttctatgcatgccaattatacacatctctatctgcatttttttttctattttaaccgctgaaggaatatgattatacaatgccatactcaatggtggcagcatttaatttaagtaatggagaagaattaaacattgtagctggatctgtttctgtagtcgaggacaactgtgatgtaactttgaattaaacaaacaaaacaaaacagaagaaga

SEQ ID NO: 48592 - DNA, 1558 bp, Homo Sapiens
agtacatggagggagctgctcgccagagacagtactgcatcctgctcctcttctacttggcctacatccatgaagacagactatggtcagtgcaatcagaaaattcctagaaggcatcccagacctgcagctagtctatactcaccatccgctcctgctcaggttctttctgttgtatccagagctcatgagtaggtatgggcaccgtgtcctggaactttggttcttctgggaagagagcagctatgaggaactggatgatgtcacctctgctgggcagcccgcccttcctgccagcttagtagtcctgttccagttgctcagaagcatccccagcatcctgctcatcttgctggacctcatctattccagcccagtggacacagctcacaaggtactgattagcctgaggaccttcctgaggaggaatgaggatatccaagtgggcggtcttatccgaggccacttcctgctgatcctgcagcgtctgctagtggagcatggggcatccccatcaggagcctcggggaacctaccattgctgctgagcctcctctccctgatgcagctcaggaatgtgtcagagcaagaactggacagcgtggccatgaagctccttcaccaagtaagcaagctgtgtgggaagtgcagccccactgacgtggacatcctgcagccctccttcaacttcctgtattggagccttcatcagaccacacccagcagtcagaaaagagctgctgcagtgctcctgagcagcacaggcctgatggagcttctggagaagatgctggccctcaccttggcaaaggcagattctcccaggactgcactcctctgctctgcctggctgctcactgcctccttctctgcccagcagcacaagggcagtttgcaggttcaccagacactctctgtggaaatggaccaagtattgaaggctctcagctttccaaagaaaaaggctgcactactctcagctgccatcttatgcttcctgcggacagccctgcgacaaagcttttcctctgccctggtagccctggtgccctcaggggcccagccactgccagccaccaaggacactgtcctagctccactgcgaatgtcgcaagtccggtccctggtcattgggctgcagaacctcctggtgcagaaggaccctctattgtcccaggcctgtgttggctgcctggaggccttgcttgactacctggatgcccggagcccagacattgtgtttcttgaagctctccacgtggcctcccagccttggaatcggtttttgctgtttaccctcttggatgctggagagaattccttcctcagacctgagattttgaggctcatgaccctgtttatgcggtaccggagtagcagtgtcctctctcatgaagagctccagagcatgggacacctggctgaccacagcatggcccagaccctgcaggcctccttggagggccttccccctagcacctcctcaggccagccacccctgcaggacatgctctgcctgggaggggtggctgtatccctgtcccacatcagaaactga

SEQ ID NO: 48593 - DNA, 501 bp, Homo Sapiens
aaaaaaggggtccccgtgaaagtgaccatcaagatggcaccacctcaccagacctccttggagctcttcgtgtacctgaacgaagtcacgggcaagcacggcatgggctgtattgacattatggagaactgcttcattagaataaagtccagaggtatctacaagaccccagcaggcaccatccttcaacaggctgatttagacatcgaggacttcactatggatcgggaagtgcacaaaatcaaccctgagtgtaaatctgtccaccattgcatcaccaagtcccaggagcaaatggaaggaaaagtgcaggtgcccatcttcaagggccaggtgcacatcctcagccaggagtctctactctctctctacaaggaggagctggtgagcgtcaacgtgcaggggaattatgagccaatcgatgccaccggtttcatcaacatcaattacctcagactgaaggaatatcattatttccagagtaaggtcactgtcaaatag

SEQ ID NO: 48594 - DNA, 483 bp, Homo Sapiens
cagcgggtggtaactccagttctagccaggacagattcagagccctcaggactcaggggcacacacaagccacacaggtggggctgcagatgtggggctcaccgtgctggagccaggctggttggcactggcatgggacctggggaatcagccctcggctgggcagccaggatgcctcctgctctctttcctccatcccaccccttccacttccagaggccccgggatatttttaaggggaaggggaaggatagagagaaagtgcaggcagggctggggtctgggcctgtgggatcctcaggcaggaggggagggctatatcatgatggcctggagctggggctggaggtgagtcttcccggatgctgggaatcaccaggcgggcaggagggctgttccaggctgagggaagggcaggtgcaaagcccagagtggggaagacgctgggcagcagtgtgggtggtgcagccggactggtgggag

SEQ ID NO: 48595 - DNA, 1905 bp, Homo Sapiens
atggaggcgcaggtcctgcagcggcagatcttgcacctggagcagctgcaccacttcctcaagctcaagaacaacgaccggcagccggatcccgatgtcctggagaagcgtgaaaagcaggccggggaggtggccgagggcgtctggaagacctcccaggagaggctggtgctttgctacgaggacgccctgaataaactgtcccagctgatgggggagagtgaccctgacctgttggtgcagaagtatctggagatcgaggagcgcaactttgctgagttcaacttcatcaacgagcagaacttggagctggagcatgtgcaggaagagatcaaggagatgcaggaggctttggtgagcgcacgtgccagcaaggatgaccagcatttgctgcaggagcagcagcagaaggtgttgcagcagcgcatggacaaggtgcactcggaggctgagcgccttgaggcccgcttccaggatgtgcggggacagctggagaagctcaaggctgatatccagctcctcttcaccaaggcccattgcgacagcagcatgatcgatgacctccttggggtcaagaccagcatgggagaccgggacatgggcctcttcctgagcctcattgagaagcggctggtggagctcctgacagtgcaggccttcctacatgcccagagcttcacctccctggccgacgctgccctcctagtgctgggccagagcctggaggaccttccgaagaagatggccccacttcagccccctgacactctagaagaccccccgggttttgaggccagcgatgactaccccatgagcagggaggagctgctgagccaagtggagaagctggtggagctccaggagcaggcggaggcgcagcgccagaaggacctggccgccgccgccgcgaagctggacggcaccctgagcgtggacctggccagcacccagagggccggctccagtaccgtcctggtgcccaccaggcacccccatgccatccccgggtccattttgagccacaagactagcagagaccgtggctctcttggccacgtcacttttggcggcctcagctccagcactgggcatttgcccagccacatcacgcacggtgaccccaacactggccacgtgaccttcggctccaccagtgcctcgagtgggggccacgtgaccttcagacccgtcagcgccagcagctacctgggctccactggatacgtggggtccagcaggggcggagaaaacacagagggtggtgtggagagcggaggcacagcgtctgattcgagcggaggcctcgggtccagcagagaccacgtctccagcaccggccctgcctccagcactggcccgggctcctccaccagcaaagactcccggggctaacacgaggggcacgcagcccccaccctgccctggctctctgtggggtctttttttgtgtctctacttcccctgtttgccttgtgggtctctgtctttttctcccagtggcaggcctctgtctttttgccccttcaactgttttcatctgcccttcatcaccgcctcacctgtgtctcccggttcctttctctctgctcctgacactgcttttccctctgactcctgatctcctgttctctgggcttcctggtcagtgtctgtccgtcttgtctccatatctgccccttccctgtctgctgagccctggccccctgtggatcccccacctcctgtttccggctctctctcctcatctccatctcccaggctctccacgcatcctgtgtccctgtctctgtagctccttactccccaagagccccccagtgctgacaggtgtgggaaaagtcagggcgaagacgccaggttcagcatgggaaaatgggactgtggaaataaagtatatgtgtggag

SEQ ID NO: 48596 - DNA, 918 bp, Homo Sapiens
atggaatttgtgttcctggcctatccctcctgcccagaactgcatattctgtccttccttggggtcagcctggtttatggtttgatcatcactgggaacattctcattgtggtgtccattcacacagaaacctgtctatgcacatccatgtactatttcctgggcagcctttctgggattgaaatatgctacactgcagtggtggtgccccatatcctggccaacaccctacagtcagagaagaccatcactctcctgggctgtgccacccagatggctttcttcattgcactgggcagtgctgattgcttcctcttggctgccatggcctatgaccgctatgtggccatttgccacccgttgcagtaccctctcctcatgacattgactctttgtgtccacttggttgtggcatcagtcatcagtggtctgttcctgtccttacaactggtggccttcatcttctctctgccattctgccaggctcagggcattgagcacttcttttgtgatgtgccaccagtcatgcatgttgtttgtgctcagagtcacattcatgagcagtcagtgctggtggcagccatactagccattgctgtgcctttcttcctcatcaccacctcctacaccttcatagtggctgctctgctcaagatccactcggctgctggccgccaccgggccttctccacctgctcttcccacctcactgtggtgctgctgcagtatggctgctgtgccttcatgtacctgtgccccagctccagctacaaccccaagcaagatcggttcatctcactggtgtacacattgggaaccccactgctcaacccacttatctatgccctgaggaacagtgagatgaaaggggccgtagggagagttcttaccaggaactgcctttcccagaacagctag

SEQ ID NO: 48597 - DNA, 915 bp, Homo Sapiens
agagcaatggagaatgtcactacaatgaatgagtttcttctacttggcctgactggtgttcaggagctgcagcctttcttctttgggattttcttaatcatttacctgataaacttgattggaaatggatctatattggtgatggttgttttggaaccacaactccactcccctatgtatttttttctgggaaacctttcttgtctggatatttcttattcttcagtgacactgcccaagctgctcgtaaacctcgtgtgcagtcgcagggctatatcttttctaggctgtatcacccagctacacttcttccactttttgggaagcacagaggccattttactggctatcatggcctttgaccgttttgttgccatctgcaatcctcttcgctacactgtcatcatgaacccccaggttctatgcaatcaattagcagcctcatgctgggctgctggtttccttaactcagtggtgcatacagtgttgacattctgcctgcccttctgtggcaacaatcagattaattacttcttctgtgacatcccccctttgctgatcttgtcttgtggaaacacttctgtcaatgagttggcactgctatccactggggtcttcattggttggactcctttcctttgtatcgtactttcctacatttgcataatctccaccatcttgaggatccagtcctcagagggaagacgaaaagccttctctacatgtgcctcccacctggccattgtctttctcttttatggcagcgccatctttacatatgtacggcccatctcaacttactcattaaagaaagataggttggtttcagtgttgtacagtgttgttacccccatgctaaaccctataatttacacattgaggaataaggacatcaaagaagctgtcaaaactata

SEQ ID NO: 48598 - DNA, 936 bp, Homo Sapiens
atgactgggggaggaaatattacagaaatcacctatttcatcctgctgggattctcagattttcccaggatcataaaagtgctcttcactatattcctggtgatctacattacatctctggcctggaacctctccctcattgttttaataaggatggattcccacctccatacacccatgtatttcttcctcagtaacctgtccttcatagatgtctgctatatcagctccacagtccccaagatgctctccaacctcttacaggaacagcaaactatcacttttgttggttgtattattcagtactttatcttttcaacgatgggactgagtgagtcttgtctcatgacagccatggcttatgatcgttatgctgccatttgtaaccccctgctctattcatccatcatgtcacccaccctctgtgtttggatggtactgggagcctacatgactggcctcactgcttctttattccaaattggtgctttgcttcaactccacttctgtgggtctaatgtcatcagacatttcttctgtgacatgccccaactgttaatcttgtcctgtactgacactttctttgtacaggtcatgactgctatattaaccatgttctttgggatagcaagtgccctagttatcatgatatcctatggctatattggcatctccatcatgaagatcacttcagctaaaggcaggtccaaggcattcaacacctgtgcttctcatctaacagctgtttccctcttctatacatcaggaatctttgtctatttgagttccagctctggaggttcttcaagctttgacagatttgcatctgttttctacactgtggtcattcccatgttaaatcccttgatttacagtttgaggaacaaagaaattaaagatgccttaaagaggttgcaaaagagaaagtgctgctga

SEQ ID NO: 48599 - DNA, 1051 bp, Homo Sapiens
gccctttcctcagtcctgctgatgtcctccagctgattccaggctgttcccggccacccctgaggccgtcctttcgcttcttgtaaaagcctccccgcctcctgagctccctcggtcgcctcccgagaagccaacgggcctctctggtggagcgttaggttgacagcgttttagcaggaccgcgagaaaccggggagatcctcttacgaggaaaaactccaagattacatccctgttatctttcctccaagagctgactaaggctttggaacagaaaccagatgatgcacatatattatcgtcaaagagcttattgtcacattcttcttgggaattactgtgagacggggtttcactgtgttagccaggctggtctcgatttcttgacctcgtgatccacctgcctcggcctcccaaagtgctgggattacacgcgtgagccgccatgcccagccagaaacgcatctttttctacatagttgctgttgctgatgcaaagaagtctcgcgaattcaatccaaataattccactgctgtgctgagaaaagggatatgtgaataccatttaaaaaactatgctgctgctctagaaacttttataggaggacaaaaattagtgcagatgctaatttcagtgactggattaaaaggtgtcaagaagctcagaatggctcagaatctgaggtgagtttcgctcttgttgcccaggctggagtgcagcggcatgatctcagatcattacaacctccacctcctcggttcaagcaattctcctgcttcagcttcctgtgtagctggggttataggcacacgccaccatgcctggctaatttctgtatttttagtagaaacgggggtttcaccatgttgaccaggctggtctcgaactcctgatctcaggtgatccacccaccttggcctccgaaagtgctgagattacaggcgtgagctaccatgcccggcccttaccaggattttggtctgcctctggtcctgtccacattgtgtagaatttgtttaataaaataattttgagtaatcaagcacaaaa

SEQ ID NO: 48600 - DNA, 4080 bp, Homo Sapiens
cattacaaggggacatgctgggagagctccccagacacccctgatgccttttctgcaccttcaggaacaggtcttttgccaactcctattactcagcaagccagtttgacatctctggcacagggaactggaaccacatcagccattactttcccagaggagcaagaagaccctagaattactagaggtcaggatgaagcatctgctggtggaatctggggttttattaagggtgtggctgggaatcctatggtgaagtctgtgcttgataagacaaaacattcagtagaaagcatgattacaacgctggaccctggcatggctccctatatcaaatctggaggtgaactggatattgtagtgacctcaaataaagaagtaaaagttgctgctgtccgagatgccttccaggaggtctttggcttagctgtggttgtaggggaagctggacagtccaatattgccccacaaccagtgggctatgcagctggattaaaaggtgctcaggaacggatagatagcttgcgtcgaactggggtgatccatgaaaaacagacagctgtgtcagtagaaaacttcattgcagaattgctgcctgacaaatggtttgacattggttgtttggtggttgaagatcctgtccatggcattcatctagaaacatttacacaagccacaccagtgcctttggaatttgtacagcaggctcaaagtctaactccccaggactataatctgaggtggtcaggccttttggtgacagtgggtgaagtcctggaaaagagtttactgaatgtcagccggactgattggcacatggcatttactgggatgtcccgtcggcagatgatctacagtgcagccagagcgatagcgggcatgtataaacagcgcctgccacccaggacagtgtgagaggagacctacctgggagactgagactttcccccacttttagcttgatgttaaagaagtggttgtaccttcctaaatcgaatagtctaaatgaatccagtagtttttatcattttcctgtagcctgcaatttttctttctctagaaaggcatcatgtcattccaggagacaaaaagaaacaaatcctttttatagtcataccatttcacctatcatagtactcaaaaaagaaaatatacaaatctatttacagcacaatttaatataccagatttataaggtggaaattcatgtgcagagacatttaacttaatgccatgtacttgattattttgttctttaaagaagacattattaaagaacatgttggttgaatgtttataaaagcatgatttgctttggcttcatctcttttctgtcagtctttgactacttttgtatgtgcacacgatctcagggctggtgctgagcagcctgctcaacagtcactataagacacctacttgtcgggagatgttccacatttctgtgcatgttttcagtaatatgggccaaaataatggaattgattattttcctttttggccatcacgtacacatgtaatctggaaaatcatacctttgtcaattttaaacataacttttggcatttcccagatttatactatgaacattggggtaatacattttattttttcattgctatatgacagctaaggggcaaatgattcaagtatattttaaatcagaagtattcaaattatttttgtataatactgttcagtacttccaagaataagctctgacaacagccattgtttctgcttccactcatattctctacacattttaatacagaaatttttgagagggggttactttattgcttgtgggttagtatgtctcttacttcaattaaggttacttatttggtttgccttaagcattacttttttaactttgtgccatttggtctttactttttatggatgttttcaaagaaactattttatattcaatctagtttatttagtctactgtatttctatttcgtggaagccttttcccctcaaataatatattatatcatttttggacttatataaatgataattaaataaatttttttcttaatactgttggactttgtatatacaagttcaaataactttttcgaagatagtttcttatataaatgtaatttaatttttttactcttctatacagttctttagatgtaaaagaattagcacaatctctggcagttttataaaagctgttgaagctcttgtcctgcactgtctttaggtatcataggtatcaggtttgctttgtgttaatgccacttcaagtcattatttggtttctgctatttttttacctgaggataagaagaatgaatattaaatttgaatattaaatatatgttactttccaagcactgtataatgactgttcagtgaatatcagacttccgtgtcattaaaagtcatgagagacagcacagagaggttataggttgccttggtgtacttttgtccaggagtaacagggacagaatactttctttctttccttcaagtacaagaaggctttctctaccatttgcgtctacactttattttaaaagctatccttttctagtagtattttatcatggcaatggcatgatgacaacaacagtctttcattacagactgaagggaagcatgtccttacttaaaatagttctgctactttccctcctattataaggaaatcttacagattctaaaaataccttaatttttctttgatttttattttaccaagtcacaaatgtctttttgatgttttgagaattgttctcatagaatcacaaatactgacatttcattagatgattattttcctagaatccccaaagagcagtggcagtccatggcttggttgaagctagaaattttcctgcccctggtgacctggtaagcctcctgctcggaaccgtgtgagtgggtgaggaagatgagagatggtcagatggaagagagaaatacatgaactgctctggcctctctggttctgttcttggcccagagtttttgaaaagcagcggagcatgactgacttcacatgctcagctttctcagccttttgtttattttgttgtccttagatttccctgttgtaaaaggggcaagaaaagtaactcatcatctctaacacaccatggcagcttagccaggtagtcttagtggtggtgtttaggcataagatatgctgatcatcagtctcaggccacagtttccttcactaatcgtccagcttgagtgttctgttctcttcctgcccatttccttgaacctcctgctctagccttggcggagggagagtgctatttgcttttgttctccctctgtcttaggaaaagccatctttaatatagttcttcaccactgttggggttgttttgtgattttttttttcttccgaagaactcctggttgttattggattttgtattttaatacaaattattgaattttataagcttgtacacaatatttaattagtgtgaaaggaaacaaagaatgcaggaaaaataatttaatatcaacctcagttgacaaggtgctcagattattcaattcgggatcctccttttgttaggtttttgagacaaccctagacctaaactgtgtcacagacttctgaatgtttaggcagtgctagtaatttcctcgtaatgattctgttattactttcctattctttattcctctttcttctgaagattaatgaagttgaaaattgaggtggataaatacaaaaaggtagtgtgatagtataagtatctaagtgcagatgaaagtgtgttatatacatccattcaaaattatgcaagttagtaattactcagggttaactaaattactttaatatgctgttgaatctactctgttccttggctagaaaaaattataaacaggactttgtagtttgggaagccaaattgataatattctatgttctaaaagttgggctatacataaattattaagaaatatggatttttattcccaggatatggtgttcattttatgatattacgcaggatgatgtattgagtaaaatcagttttgtaaatatgtaaatatgtcataaataaacaatgctttgactta

SEQ ID NO: 48601 - DNA, 738 bp, Homo Sapiens
atggtcgaaggccttcaggtcacagtgcccgacaagaagaaggtggccatgctcttccagcccactgtgcttcgctgccacttctcaacatcctcccatcagcctgcagttgtgcagtggaagttcaagtcctactgccaggatcgcatgggagaatccttgggcatgtcctctacccgggcccaatctctcagcaagagaaacctggaatgggacccctacttggattgtttggacagcaggaggactgttcgagtagtagcttcaaaacagggctcgactgtcaccctgggagatttctacaggggcagagagatcacgattgttcatgatgcagatcttcaaattggaaagcttatgtggggagacagcggactctattactgtattatcaccaccccagatgacctggaggggaaaaatgaggactcagtggaactgctggtgttggagtgggtgtttgttggcctggtgctcctgggcgtcttcctcttcttcgtcctggtggggatctgctggtgccagtgctgccctcacagctgctgctgctatgtccgctgcccatgctgcccagattcctgctgctgccctcaagcctctcaccttcttgtgcttttctcaacagttcgcaaaggttaccggatccaggctgacaaagagagagactccatgaaggtcctgtactatgttgagaaggagctggctcagtttgatccagccagaaggatgagaggcaga

SEQ ID NO: 48602 - DNA, 4435 bp, Homo Sapiens
cccccttgtcattaatacattaaaaagattcaatctttaccctgaggtaattttggccagttggtaccggatttataccaaaataatggacttgattggtattcaaaccaagatatgttggacggttaccagaggagaaggactcagtcctattgaaagctgtgaaggattgggagatcctgcttgcttttatgttgctgtaatttttattttaaatggactaatgatggcattattcttcatatatggcacatatttaagtggcagccgattaggaggcctggttacagtgttgtgcttctttttcaatcatggagagtgtacccgtgtaatgtggacaccacctctccgtgaaagcttctcatatccatttcttgttcttcagatgttgctagtgactcatattctcagggctacaaaactttatagaggaagcttgattgcactctgcatttccaatgtatttttcatgcttccttggcagtttgctcagtttgtacttcttactcagattgcatcattatttgcagtatatgttgtcgggtacattgatatatgtaaattacggaagatcatttatatacacatgatttctcttgcactttgttttgttttgatgtttgggaactcaatgttattaacttcttattatgcttcttctttggtaattatttggggtattctggcaatgaaaccacatttcctgaaaataaatgtatctgaacttagtttatgggttattcaaggatgtttttggttatttggaactgtcatacttaaatacttgacatctaaaatttttggtattgcagatgacgctcatattggcaacttactaacatcaaaattctttagttataaggattttgatactttattgtatacctgtgcagcggagtttgactttatggaaaaagagactccactgagatacacaaagacattattgcttccagttgttcttgtagtgtttgttgctattgttagaaagattattagtgatatgtggggtgtcttagctaaacaacagacacatgtaagaaaacaccagtttgatcatggagagctggtttaccatgcattgcaattgttagcatatacagcccttggtattttaattatgagactaaaactcttcttgacaccacacatgtgtgttatggcatcactgatctgctcaagacagctatttggatggctcttttgcaaagtacatcctggtgctattgtgtttgctatattagcagcaatgtcaatacaaggttcagcaaatctgcaaacccagtggaatattgtaggggagttcagcaatttgccccaagaagaacttatagaatggatcaaatatagtactaaaccagatgcagtgtttgcgggtgccatgcccacgatggcaagtgttaagctctctgcacttcggcccattgtgaatcatccacattatgaagacgcaggcttgagagccagaacaaaaatagtatactcaatgtatagtcggaaagcagccgaagaagtgaagcgagaactgataaagttaaaagtgaactattacattctagaagagtcatggtgtgtaagaagatccaagcctggttgcagtatgcctgaaatttgggatgtagaagatcctgccaatgctgggaaaactcccttatgtaacctcttggtgaaggattccaaacctcacttcaccactgtattccagaacagtgtttacaaagtcctagaagttgtaaaagaatgactgctacatgacctgctgcctacggagaactacatctgtaatggttttaatgttttgctaagtcatgtgttgttcatatcccaaaaacttttataggtaactgttttcaaatagaaaacgttttatttggtcaatttgaatgtcattctaattataaaaatgacttacacctttatcaattggttactatttcaatgcaccctttaaaatttgctatgcaaatgagtatatgcttgtacttgactttaatatttgtgctaaagtgagcaaagctacctgtataaagaaaacacagtgggttgtgacaaggatgacatgaaaatacaggacaattctgacaatgtaggggctgattttatagtgtaagaactattaatgccccttgcttcttttttctgcctcttgctcttgtcttttggacatttcagtgattgtaagttcttcggtcatgtcagcccctgtcatcaacttgagttacagtagatggggcagacatggagtgtttgctatatagaactatctgtttgttttacttccttgtgcgctttttgttctctgttctcttgttaatgaagcttttcctgcccattattaatccaaactcttggaccttgtggttaggaaattcccttaacttccagccatatggcattatcgtgtctctttctctctctctcttgctctctctcttctcctcttccccatattttctgtcaaataagtactgtttactcatttagttgcttatcaagtacttattcttggttttaaaaaaaattaatggtaactgtatttttctcatttttagcattattcaaatgtttatattttaatacctttaaaccactttaaagttttttcatgtttaattatagttttaagaaaaactattttgaacaaccccaaatatagtgcatctagaaactaatgtatatttgattagacatcatttatagtggaacagtagactgtagtacatggtaatttttcttttactattaagatacaataaaacatgactaattttgctgtcaaaaatgtaaagaataatgataaatggagtttttatattttacttttaagattgcctgtctttaataagacaaagccttaagccttatgttataattttggttctaaaaaccatcatttcagtataaggaataagtatatttcgtcctcctctttagtttttttcttcctatttatttttattttgaaaaatttctacaccttctttgaattccttgtatgaatttttgtttcttagaagttaatttgtgtgaaatgagattcttcaaaacgatgaaacctcatagctctgagaaaaggttttagggttttaaattctaagcaaagcgtgactatggctgacagactacacatttaattatacagcttctctttcttaaccacaggcagattaacctcattgtggattgtccttcagaccttagtcctcaggcatggtttctggtgcccactcctggaagccgctgttccctttctaccttcttaccagagcccaagggcaggcctggtcccggggaagcagcagcttgctgacataagtcagctgcaaaggctgaggagtgtgccctcagagaagcaccgccccccagtcttgtgccagcgcctagagccgcagctcccagggatgctccttccctggaggcagcccaggagagggactctggcagcgttcttcagatttgtggccactgtttctcatttgctggttgactgtttttatttcttaggcttttgctagttttagaaaatagggaagcagcccttgatttgtggattaaaagcaacatttgagcgatgatgcacaacagtccaggaaaatgggcggtggacacttgaggctgaggatgggagttgacatgagcagggagagggaggtgcgcgctgcttatctgtgattgttgctcacctgagtgtggctgattgtgtacatccagcagttacaatttttaaaaattatacttttacatttattttatatttttctcacccccagtaatttccttccaaagaagttcacatgtaataagtagaaattctgtataggaaaaaagcattaaaaatactattataactgcttcatttgctgggaaccattaaaagtaatataaattagctttttccagaaggatccttttgtagcagtgtttatgaatgtaacccccagcaaaatatggctatatattaggggagccagtttggagcagaggcctgaaggtccctgctatgcagccgtggccacagctcgcagcccaagcactgtggagcatccacacctttgatggcaatgcagattggtagcaggttccataggcgtacaaaacagtattaaagctcagtgttttgcatattgttagcatttacaaatatttttgctttagtatgaggaaagtaaggatgggcaaagaagcgatcaaaatagctattgctacaacattttcgaaaacaaagttggggctgtatttctttaaaaagataagcctctaaaaatgcttggcaaaaaaaatatagtgttaaaataggccagtgatattaatgagaaaatgaaagtatgtatcaggaataaagtgatattgcataggagtattgtatttttatgaattttatgccagttgtttacatgtactatatatgttaaattaaaaaaaatcatgagtaatg

SEQ ID NO: 48603 - DNA, 603 bp, Homo Sapiens
atgcggtgggccctactggtgcttctagctttcctgtctcctgccagtcagaaatcttccaacttggaagggggaacgaagtcagtcacgaggccgactaggtcatctgctgaaatcacttgtgaccttactgtaataaatgccttctacatccactggtacctacaccaggaggggaaggccccacagcgtcttctgtactatgacgtctccaactcaaaggatgtgttggaatcaggactcagtccaggaaagtattatactcatacacccaggaggtggagctggatattgatactacgaaatctaattgaaaatgattctggggtctattactgtgccacctgggacaggcacagtgattcagacctgtcctacaccacactgaaaatctgccttgtggctgcctctggttcacaggatagagccgccccctctcatttcctgtcaccaaatttactgtattctgaacaagagaaagacagcttaactcctgatctccctcctaatatcacactgtcctggcagcagccgcaccctgttccccacccctcccccacaactttcctgaagatcaagctgccatctccaggcctcagctaa

SEQ ID NO: 48604 - DNA, 1927 bp, Homo Sapiens
cagagtggagccatggctagaggcaggaagatgtccaagccccgcgcggtggaggcggcggcggcggcggcggcggtggcagcgacggccccgggcccggagatggtggagcggaggggcccggggaggccccgcaccgacggggagaacgtatttaccgggcagtcaaagatctattcctacatgagcccgaacaaatgctctggaatgcgtttcccccttcaggaagagaactcagttacacatcacgaagtcaaatgccaggggaaaccattagccggaatctacaggaaacgagaagagaaaagaaatgctgggaacgcagtacggagcgccatgaagtccgaggaacagaagatcaaagacgccaggaaaggtcccctggtaccttttccaaaccaaaaatctgaagcagcagaacctccaaaaactccaccctcatcttgtgattccaccaatgcagccatcgccaagcaagccctgaaaaagcccatcaagggcaaacaggccccccgaaaaaaagctcaaggaaaaacgcaacagaatcgcaaacttacggatttctaccctgtccgaaggagctccaggaagagcaaagccgagctgcagtctgaagaaaggaaaagaatagatgaattgattgaaagtgggaaggaagaaggaatgaagattgacctcatcgatggcaaaggcaggggtgtgattgccaccaagcagttctcccggggtgactttgtggtggaataccacggggacctcatcgagatcaccgacgccaagaaacgggaggctctgtacgcacaggacccttccacgggctgctacatgtactattttcagtatctgagcaaaacctactgcgtggatgcaactagagagacaaatcgcctaggaagactgatcaatcacagcaaatgtgggaactgccaaaccaaactgcacgacatcgacggcgtacctcacctcatcctcatcgcctcccgagacatcgcggctggggaggagctcctgtatgactatggggaccgcagcaaggcttccattgaagcccacccgtggctgaagcattaaccggtgggccccgtgccctccccgccccactttcccttcttcaaaggacaaagtgccctcaaagggaattgaattttttttttacacacttaatcttagcggattacttcagatgtttttaaaaagtatattaagatgccttttcactgtagtatttaaatatctgttacaggtttccaaggtggacttgaacagatggccttatattaccaaaacttttatattctagttgtttttgtactttttttgcatacaagccgaacgtttgtgcttcccgtgcatgcagtcaaagactcagcacaggttttagaggaaatagtcaaacatgaactaggaagccaggtgagtctcctttctccagtggaagagccgggaccttccccctgcacccccgacatccagggacggggtgtgaggaagacgctgcctcccaatggcctggacgggatgtttccaagctcttgttcccctaacgtctcaacaggcgctcactgaagtgtatgaatattttttaaaaaggtttttgcagtaagctagtcttcccctctgctttctcgaaagcttactgagccccgggccccaagcacgggccgggcatagatttcctcttccacaagctgccgcttttctgggcaccttgaagcatcagggcgtgaaatcaaactagatgtgggcagggagagggttgcttacctgccctgctggggcagggtttcctgaaactgggttaattctttatagaaatgtgaacactgaatttattttaaaaaataataataaaaatttaaaaaaattaaaaataaaaaaaaccacagaaaacaactttacatgtatataggtcttgaagtgagtgaag

SEQ ID NO: 48605 - DNA, 360 bp, Homo Sapiens
atgcgtttgcctatgaaaattttttttggaactgaaacaaaacaaaacaaaaaagcccaaccaactttgaacttgttttcactagcccagccgatgtgccactataagccttcaagggccttaccccagcaaggcctctgctttggtgctctccatgacgcaatctgtctctctgcagacacaactctaaggtgtctccagagccaaagtcaggtgaagaaatggggttattgtgtggattattttaggtcagaatacaggccaaaaacaaaactggttctgtttgaaattgcctggctgccctcattttgtcacttgactttacatggagagatactgctccaggaattacccaaatga

SEQ ID NO: 48606 - DNA, 367 bp, Homo Sapiens
agcaggagaagagaaaggacagggtctgaaagaatgcataaatgtgtcagtgaatggtgagtggtgcatattacgaaggtattggttgtcaaggcaaaccaagttggtgtgtttttcttttataaccttcctttccgctttgcagttggtggaaccattaactcccagtggcacagcacccaatcaagctcaacttcgtattttgaaagaaactgagctgaagagggtaaaagtccttggctcaggtgcttttggaacggtttataaaggtatttgggtacctgaaggagaaactgtgaagattcctgtggctattaagattcttaatgagacaactggtcccaaggcaaatgtggagttcatggat

SEQ ID NO: 48607 - DNA, 390 bp, Homo Sapiens
atggatctggccaaaatctttcaacattttcaggctacttgtctgactcatttttatttcttcctggaaaactttccatccagagcactgcatccttctgctgtaataccaactggctgttccataggccagatgaatttctcttctcctgggacatctctctgtctcttccatagtaggttccctgtttcctccatctatgacttcctctttcttatcagtttcctttgctggagcataaccatgagaagtacattttttgagcccctgtatgagtctttagtttatagagttctatttccaaaagcatttttcctcagaattctgaaggcctttcttcacagtcttttagctttcagtgttgctagagagaagactttccatttctga

SEQ ID NO: 48608 - DNA, 318 bp, Homo Sapiens
ccaccccaagctgtctccggcctgcggtcagggggaggggctctagctgtggaaagttggcagaggcggccggcagcagccgggagagtggaaaaaatgatatcaaacccggaaaaatgcaggccggatggagggccggagtgggccctgggagaggagacaaagttttgctgtgttgcccatgatggtctcaaactcctgagctcaagagatgctcccacctcaacatcccaaggtgctgagatttcaggcatgagccactgggtctcaccctgctatcatatcttaaggccttgcagaaaccaggatttgttaaag

SEQ ID NO: 48609 - DNA, 606 bp, Homo Sapiens
atggcggccaccaaggacactcatgaggaccatgatacttccactgagaatacagacgagttgaaccatgaccctcagtttgagccaatagtttctcttcctgagcaagaaattaaaacgctggaagaagatgaagaggaactttttaaaatgcgggcaaaatggttgcgatttgcctccgagaacgatctcccagaatggaaggagcgaggcactggtgacgtcaagctcctgaagcacaaggagaaaggggccatccgcctcctcatgcagagggacaaaaccctgaagatctgtgccaaccactacaccacgccgatgatggagctgaagcccaacgcaggtagcgaccgtgcctgggtctggaacacccacgctgacttcgccgacgagtgccccaagccagagctgctggccatccgcttcctgaatgctgagaatgcacagaaattcaaaacaaagtttgaagaatgcaggaaagagatcgaagagagagaaaagaaagcaggatcaggcaaaaacgatcatgccgaaaaagtggcggaaaagctagaagctctctcggtgaaggaagacaccaaggaggatgctgaggagaagcaataa

SEQ ID NO: 48610 - DNA, 294 bp, Homo Sapiens
gccctgcagatggagcagatcaacaggatcctgctgcacctggagtcagagctggtacagaccctggcagaggggcagtaccaggcccaggagtacaaggccccgctgaacatcaaagtcaagcaggaggctgagatcgccacctaccaccgcctgctggaagatggcgaggacttcaatcttggtgatgtcctggacagcagcaactccaagcaaaccatccaaaagaccacaacccgccagatggtggatggcaaaatggtgtctgagaccaacaacaccaaagttctcaga

SEQ ID NO: 48611 - DNA, 729 bp, Homo Sapiens
ttaaagaagtacagccatgttaacaaaaaggctttggatcagtttgtaaatttctctgagcagaaagaaaagttaataaagcgacaagaagagttagataggggttacaaatcgatcatggagctgatgaatatacttgaacttcggaaatatgaagctattcagttaactttcaaacaggtatccaagaacttcagtgaagtattccagaagttagtacctggtggcaaagctactttggtgatgaagaaaggagatgtggagggcagtcagtctcaagatgaaggagaagggagtggtgagagtgagaggggttctagctcacaaagcagtgtcccatcagttgagcagtttactggagttggaattagggtgtcatttacaggaaaacaaggtgaaatgagagaaatgcaacagctttcaggtggacagaaatccttggtagcccttgctctgatttttgccattcagaaatgtgacccggctccattttacttgtttgatgagattgaccaggctctggatgctcagcacagaaaggctgtgtcagatatgattatggaacttgctgtacatgctcagtttattacaactacttttaggcctgaactgcttgagtcagctgacaaattctatggtgtaaagttcagaaataaggttagtcatattgatgtgatcacagcggagatggccaaagactttgtagaagatgataccacacatggttaa

SEQ ID NO: 48612 - DNA, 1041 bp, Homo Sapiens
atggtgaacaatttctcccaagctgaggctgtggagctgtgttacaagaacgtgaacgaatcctgcattaaaactccttactcgccaggtcctcgatctatcctctacgccgtccttggttttggggctgtgctggcagcgtttggaaacttactggtcatgattgctatccttcacttcctgcacacacctacaaactttctgattgcgtcgctggcctgtgctgacttcttggtgggagtcactgtgatgcccttcagcacagtgaggtctgtggagagctgttggtactttggggacagttactgtaaattccatacatgttttgacacatccttctgttttgcttctttatttcatttatgctgtatctctgttgatagatacattgctgttactgatcctctgacctatccaaccaagtttactgtgtcagtttcagggatatgcattgttctttcctggttcttttctgtcacatacagcttttcgatcttttacacgggagccaacgaagaaggaattgaggaattagtagttgctctaacctgtgtaggaggctgccaggctccactgaatcaaaactgggtcctactttgttttcttctattctttatacccaatgtcgccatggtgtttatatacagtaagatatttttggtggccaagcatcaggctaggaagatagaaagtacagccagccaagctcagtcctcctcagagagttacaaggaaagagtagcaaaaagagagagaaaggctgccaaaaccttgggaattgctatggcagcatttcttgtctcttggctaccatacctcgttgatgcagtgattgatgcttatatgaattttataactcctccttatgtttatgagattttagtttggtgtgtttattataattcagctatgaaccccttgatttatgctttcttttaccaatggtttgggaaggcaataaaacttattgtaagcggcaaggtcttaaggactgattcgtcaacaactaatttattttctgaagaagtagagacagattaa

SEQ ID NO: 48613 - DNA, 489 bp, Homo Sapiens
gtcagtttctcagagttttctaagaagtgctcagagagatggaaacctgtctgcaaaagagaaaaatttgaagacgtggcaaagttgggggaggcctgtcacaaaagagaaatgaaacctatccctcctgaaggggaaacaaaaaagttcaaggatcccaacgcactcaagaggccttctggagcctttatcttgttcggttctgagtaccgcccaaaaatcaaaaatcatcccagcctatccattagtaacgttgcaaagaaactgggagagatgtggaataacactgctgcagacaataagcagccatgtgaaaggaaggctgcaaagctgaaggaaaaatatgacaaggatatcgttgtacacggagctaaaggaaagcctgatgcagcaaaaaagaaagccgttggggctgagaaaagcaagaaaaagaatgaagaggagaaagatgaagaggatgatgttgaggaggaagatgatcatgaataa

SEQ ID NO: 48614 - DNA, 479 bp, Homo Sapiens
gttgaagcaatacacttggggagccttatcgctgcccagggctacatctttccaatctcagaccatgttctcaccatgaaggatgatggcaccttttatcgtttccaggctccgtacttctggccttcgaactgctgggaacctgaaaacactgactatgccatctatctctgtaagaggacaatgcaaaataaagcaaggctggaactggcagattatgaagcagaaaacttagcaagactccagagggcctttgcgaggaagtgggaattcatctttatgcaagcagaagcacaagtaaagattgaccggaaaaaagacaagacagaaaggaaaattttggatagtcaagaacgagccttttgggatgtccacaggcctgtgccaccaggtgtctcattcttaagaaaatcgctcagctttgtggaactggtttcgccattcatttatataatctcagtaaattttctggaatatat

SEQ ID NO: 48615 - DNA, 378 bp, Homo Sapiens
tggagggtgctggggaagttcaggctgtccccagaagtcaacttatacgaccttcatgctggactacacatgtcatctcccggagcagcaggcggtggctgggacggcagcacagagaaagcccggcacaggctccgctcagagcctcaggatgtggggaggcttctacagatgaccagcttggtggcgtcatcatccccacctggaggaaggagaccttatctggaaccaagaggcatgtctgtaagaaactcttatgaagttgtcggggttcaagttggccttcctgttgttcaacctggtggagaatgttcctgtgggccttggcagcaagtcagcattcttcgttggcatggagtcctaggaaaaagaggtacg

SEQ ID NO: 48616 - DNA, 636 bp, Homo Sapiens
tggtggccgctcctgctagagctgtggacagtcatgcccacctgggctggggacgagctgctcaacatctgcatgaatgccaaacaccacaagagagtgcccagcccagaagacaagctctatgaggagtgcatcccctggaaggacaatgcctgctgcaccctcacgacaagctgggaagcccatctggatgtatccccactctacaacttcagcctgtttcactgtggactgctgatgcctggctgtagcacttcatccaggctatctgcttctatgagtgctaaacctggggccctggatccagccagtgggaagcctggggtgggagggagagcgagtatgtgccgctgtgccaggaggactgtgaggagtggtgggaagactgtcgcatgtcttacacatgcaaatccaactggcgtggtggctgggactggagtcaggggaagaaccgctgccccaaaggggcccagtgcctccctttctcccattacttccccaccccagctgacctgtgtgagaagacttggagcaattccttcaaagccagccctgagcgacggaacagtgggcggtgtctccagaagtggtttgagcctgctcagggcaaccccaatgtggccgtggcccgcctct

SEQ ID NO: 48617 - DNA, 2118 bp, Homo Sapiens
atgaaggattcctgcatcactgtgatggccatggcgctgctgtctgggttctttttcttcgcgccggcctcgagctacaacctggacgtgcggggcgcgcggagcttctccccaccgcgcgccgggaggcactttggataccgcgtcctgcaggtcggaaacggggtcatcgtgggagctccaggggaggggaacagcacaggaagcctctatcagtgccagtcgggcacaggacactgcctgccagtcaccctgagaggttccaactatacctccaagtacttgggaatgaccttggcaacagaccccacagatggaagcattttgtttgctgctgttcagttttccacaagctacaaaacagaatttgatttctcagattatgttaaacggaaggaccctgatgctctgctgaagcatgtaaagcacatgttgctgttgaccaatacctttggtgccatcaattatgtcgcgacagaggtgttccgggaggagctgggggcccggccagatgccaccaaagtgcttatcatcatcacggatggggaggccactgacagtggcaacatcgatgcggccaaagacatcatccgctacatcatcgggattggaaagcattttcagaccaaggagagtcaggagaccctccacaaatttgcatcaaaacccgcgagcgagtttgtgaaaattctggacacatttgagaagctgaaagatctattcactgagctgcagaagaagatctatgtcattgagggcacaagcaaacaggacctgacttccttcaacatggagctgtcctccagcggcatcagtgctgacctcagcaggggccatgcagtcgtgggggcagtaggagccaaggactgggctgggggctttcttgacctgaaggcagacctgcaggatgacacatttattgggaatgaaccattgacaccagaagtgagagcaggctatttgggttacaccgtgacctggctgccctcccggcaaaagacttcgttgctggcctcgggagcccctcgataccagcacatgggccgagtgctgctgttccaagagccacagggcggaggacactggagccaggtccagacaatccatgggacccagattggctcttatttcggtggggagctgtgtggcgtcgacgtggaccaagatggggagacagagctgctgctgattggtgccccactgttctatggggagcagagaggaggccgggtgtttatctaccagagaagacagttggggtttgaagaagtctcagagctgcagggggaccccggctacccactcgggcggtttggagaagccatcactgctctgacagacatcaacggcgatgggctggtagacgtggctgtgggggcccctctggaggagcagggggctgtgtacatcttcaatgggaggcacggggggcttagtccccagccaagtcagcggatagaagggacccaagtgctctcaggaattcagtggtttggacgctccatccatggggtgaaggaccttgaaggggatggcttggcagatgtggctgtgggggctgagagccagatgatcgtgctgagctcccggcccgtggtggatatggtcaccctgatgtccttctctccagctgagatcccagtgcatgaagtggagtgctcctattcaaccagtaacaagatgaaagaaggagttaatatcacaatctgtttccagatcaagtctctcatcccccagttccaaggccgcctggttgccaatctcacttacactctgcagctggatggccaccggaccagaagacgggggttgttcccaggagggagacatgaactcagaaggaatatagctgtcaccaccagcatgtcatgcactgacttctcatttcatttcccggtatgtgttcaagacctcatctcccccatcaatgtttccctgaatttctctctttgggaggaggaagggacaccgagggaccaaagggcgggcaaggacataccgcccatcctgagaccctccctgcactcggaaacctgggagatcccttttgagaagaactgtggggaggacaagaagtgtgaggcaaacttgagagtgtccttctctcctgcaaggtca

SEQ ID NO: 48618 - DNA, 612 bp, Homo Sapiens
ctgctaaaatggatcagtgagagaggttcctggacctgtgaactttgctgttatagataccatgttatagccattaaaatgaaacaaccttgccagtggcagagcatttctataacactggttgagaaagttcagatgattgctgtaatcctaggatccctgttcttaatagccagtgtgacttggctcctctggtcagccttcagcccctatgcagtgtggcagaggaaggacatcctttttcagatctgctatggaatgtatggttttatggatctagtgtgcataggtctcattgttcatgaaggagctgcagtttacagagtgtttaagcgctggcgagctgtgaatttgcactgggatgtgttaaattatgacaaagccacagacatcgaagaaagcagccggggagagtcttccacaagtaggactttgtggttgccattgacagctctgcggaacagaaacttggtccacccaactcagttaacctcaccaaggtttcagtgtggctatgtgttattgcacctgttcaatcggatgaggccccatgaagacttatcagaagataacagctcgggggaggttgtgatgagagtgacttcagtgtga

SEQ ID NO: 48619 - DNA, 753 bp, Homo Sapiens
atgctgccacctcccttagagctggggtaccgggtcacggcggaagacctgcacctggaaaaacaggcagcattccagcgcatcaacagtgcactgcacgttgaggacaaggccatctcggactgcagaccctcacggccttcccacactttgtcctcacttgcaacaggggcttcgggtgggcctcccctttctaaagcacccactatggatgcacagcaggacagacccaagtcccaagactgcctgggcctagtggcccccctagcatctgctgcagaggtctcctctacagctcccgtgtctgggaagaagcagagaccaccaggacccctgttctcctcctcagatacccttcctgccacctcttcccactcccgggactcagcccaggtcacctcgatgattcctgcccccttcacagctgcaagcagggatgccggcatgagaagaacaaggtcggcccctgcagctgccgcagcagcccctcccccctccacattgaaccccacgtcggggtcactactccagtggatggaggcccctcacatttcttggcctcagccacagctgcagcacgtgcccagagaagtgagatataaccagagatcccagacctcccggaccagatcctgcctccaaggaaatgccagctccagctcccacagttctacggaaggcctcccggaactaaagcggaggagggggccagcctcatgccactgccagctggccctcagttcctcaaacaca

SEQ ID NO: 48620 - DNA, 234 bp, Homo Sapiens
atgctgctcctgggcctgctgctgctgctgcccctgctggctggcgcccgcctgctgtggaactggtggaagctccggagcccacctcccgcctcttgccccgggcttcttgcacttgctgcagcccgacctcccaatctatctgcttggcctgactcagaaattcgggcccatctacaggctccaccttgggctgcaagatgtggtggtgctgaactccaagaggaccattga

SEQ ID NO: 48621 - DNA, 585 bp, Homo Sapiens
atgtttcctaggcctgtcttgaactcccgggctcaagcgattctcctgcctcagcctcccaacatgctggatcacaggcagtggccacctcgcctggccagttttccctttacaaaaactggaatgctgagccgggccacatcagtcttggctggactcactgcccacctctgggaccttggcggtggggcgggaaggaggacctcaaaggctcagcgagtccacccccagcccagccaccagcgccagcctcctcctccgcaacacccaggcccttatcaggaaaggatttgggttggtggggaggggtggggggaagttggaggcctcaggctcagcaaggtgggtcggagagatagggaagtggggagggggctgcgggcccctgctgggcgggggagggcaatgggagggatgcccagaatgggcacggtgggggactttggccaagctctgtcctcgctggcctggacctcaacatgtttccaggacttctgcctcccatccttgccaggcaagttgcctgcacctttaattagcaagcagcagtttctctccaattcatcacggtcgctgtttaattag

SEQ ID NO: 48622 - DNA, 87 bp, Homo Sapiens
gccaaagatgtaaaatttggcgcagatgcccgagccttaatgcttcaaggtgtagaccttttagccgatgctgtagctgttacgatg

SEQ ID NO: 48623 - DNA, 3612 bp, Homo Sapiens
atggacaagctgccgccgtccatgcgcaagcggctctacagcctcccgcagcaggtgggggccaaggcgtggatcatggacgaggaagaggacgccgaggaggagggggccgggggccgccaagaccccagccgcaggagcatccggctgcggccactgccctcgccctccccctcggcggccgcgggtggcacggagtcccggagctcggccctcggggcagcggacagcgaagggccggcccgcggcgcgggcaagtccagcacgaacggcgactgcaggcgcttccgcgggagcctggcctcgctgggcagccggggcggcggcagcggcggcacggggagcggcagcagtcacggacacctgcatgactccgcggaggagcggcggctcatcgccgagggcgacgcgtcccccggcgaggacaggacgcccccaggcctggcggccgagcccgagcgccccggcgcctcggcgcagcccgcagcctcgccgccgccgccccagcagccaccgcagccggcctccgcctcctgcgagcagccctcggtggacaccgctatcaaagtggagggaggcgcggctgccggcgaccagatcctcccggaggccgaggtgcgcctgggccaggccggcttcatgcagcgccagttcggggccatgctccaacccggggtcaacaaattctccctaaggatgttcggcagccagaaagccgtggagcgcgaacaggagagggtcaagtcggccggattttggattatccacccctacagtgacttcagattttactgggacctgaccatgctgctgctgatggtgggaaacctgattatcattcctgtgggcatcaccttcttcaaggatgagaacaccacaccctggattgtcttcaatgtggtgtcagacacattcttcctcatcgacttggtcctcaacttccgcacagggatcgtggtggaggacaacacagagatcatcctggacccgcagcggattaaaatgaagtacctgaaaagctggttcatggtagatttcatttcctccatccccgtggactacatcttcctcattgtggagacacgcatcgactcggaggtctacaagactgcccgggccctgcgcattgtccgcttcacgaagatcctcagcctcttacgcctgttacgcctctcccgcctcattcgatatattcaccagtgggaagagatcttccacatgacctacgacctggccagcgccgtggtgcgcatcgtgaacctcatcggcatgatgctcctgctctgccactgggacggctgcctgcagttcctggtacccatgctacaggacttccctgacgactgctgggtgtccatcaacaacatggtgaacaactcctgggggaagcagtactcctacgcgctcttcaaggccatgagccacatgctgtgcatcggctacgggcggcaggcgcccgtgggcatgtccgacgtctggctcaccatgctcagcatgatcgtgggtgccacctgctacgccatgttcattggccacgccactgccctcatccagtccctggactcctcccggcgccagtaccaggaaaagtacaagcaggtggagcagtacatgtcctttcacaagctcccgcccgacacccggcagcgcatccacgactactacgagcaccgctaccagggcaagatgttcgacgaggagagcatcctgggcgagctaagcgagcccctgcgggaggagatcatcaactttaactgtcggaagctggtggcctccatgccactgtttgccaatgcggaccccaacttcgtgacgtccatgctgaccaagctgcgtttcgaggtcttccagcctggggactacatcatccgggaaggcaccattggcaagaagatgtacttcatccagcatggcgtggtcagcgtgctcaccaagggcaacaaggagaccaagctggccgacggctcctactttggagagatctgcctgctgacccggggccggcgcacagccagcgtgagggccgacacctactgccgcctctactcgctgagcgtggacaacttcaatgaggtgctggaggagtaccccatgatgcgaagggccttcgagaccgtggcgctggaccgcctggaccgcattggcaagaagaactccatcctcctccacaaagtccagcacgacctcaactccggcgtcttcaactaccaggagaatgagatcatccagcagattgtgcagcatgaccgggagatggcccactgcgcgcaccgcgtccaggctgctgcctctgccaccccaacccccacgcccgtcatctggaccccgctgatccaggcaccactgcaggctgccgctgccaccacttctgtggccatagccctcacccaccaccctcgcctgcctgctgccatcttccgccctcccccaggatctgggctgggcaacctcggtgccgggcagacgccaaggcacctgaaacggctgcagtccctgatcccttctgcgctgggctccgcctcgcccgccagcagcccgtcccaggtggacacaccgtcttcatcctccttccacatccaacagctggctggattctctgcccccgctggactgagcccactcctgccctcatccagctcctccccaccccccggggcctgtggctccccctcggctcccacaccatcagctggcgtagccgccaccaccatagccgggtttggccacttccacaaggcgctgggtggctccctgtcctcctccgactctcccctgctcaccccgctgcagccaggcgcccgctccccgcaggctgcccagccatctcccgcgccacccggggcccggggaggcctgggactcccggagcacttcctgccacccccaccctcatccagatccccgtcatctagccccgggcagctgggccagcctcccggggagttgtccctaggtctggccactggcccactgagcacgccagagacacccccacggcagcctgagccgccgtcccttgtggcaggggcctctgggggggcttcccctgtaggctttactccccgaggaggtctcagcccccctggccacagcccaggccccccaagaaccttcccgagtgccccgccccgggcctctggctcccacggatccttgctcctgccacctgcatccagccccccaccaccccaggtcccccagcgccggggcacacccccgctcacccccggccgcctcacccaggacctcaagctcatctccgcgtctcagccagccctgcctcaggacggggcgcagactctccgcagagcctccccgcactcctcaggggagtccatggctgccttcccgctcttccccagggctgggggtggcagcgggggcagtgggagcagcgggggcctcggtccccctgggaggccctatggtgccatccccggccagcacgtcactctgcctcggaagacatcctcaggttctttgccaccccctctgtctttgtttggggcaagagccacctcttctggggggccccctctgactgctggaccccagagggaacctggggccaggcctgagccagtgcgctccaaactgccatccaatctatga

SEQ ID NO: 48624 - DNA, 714 bp, Homo Sapiens
atgtggatctgcccaggcggcggcggcggcggcggcggaggaggcgaccgagaagatacccgccctccgctctgctgtgggcgctgctggcgctctggctgtgctgcgcgacccccgcgcatggtgagtatcgggctgaggggcgctgtccgcggcgcccggggctgccacctggggcgacccttctccccctcggtccttctctgtgtgggaaggccaggctcggccgccggcgcggagcgaggccactcgctgggttcccgagagtttggacatcgccgggggcccctcccgtggtgccccgccaaccgccggggttccccgccaaccgccggggttccccgccaaccgccggggttccccgccgcctctgctccccgcggcccgggacccctcacacgcctcctcggcaggagggaggccggcagcaagtctcagaaactcctttttcgtagtgccagggtgcagggaggtgggcagttttgcccttcaggttccgcgtttcctggggtcgagcgagagccgacggcgggcctcggaggggctgagcgaaggaatgccagattctggcgtggagagcgggggcagggccgccaagccaaacggcctgcaccttcgcagccagcctcgcctttgccagggggcggcacatgggccgggtgtgtgggcttggtttggatggggacggggttttgcggcgcgcctgagttttga

SEQ ID NO: 48625 - DNA, 2552 bp, Homo Sapiens
gcggtgcgggccgggcgggtgcattcaggccaaggcggggccgccgggatgctcagggttccggagccgcggcccggggaggcgaaagcggagggggccgcgccgccgaccccgtccaagccgctcacgtccttcctcatccaggacatcctgcgggacggcgcgcagcggcaaggcggccgcacgagcagccagagacagcgcgacccggagccggagccagagccagagccagagggaggacgcagccgcgccggggcgcagaacgaccagctgagcaccgggccccgcgccgcgccggaggaggccgagacgctggcagagaccgagccagaaaggcacttggggtcttatctgttggactctgaaaacacttcaggcgcccttccaaggcttccccaaacccctaagcagccgcagaagcgctcccgagctgccttctcccacactcaggtgatcgagttggagaggaagttcagccatcagaagtacctgtcggcccctgaacgggcccacctggccaagaacctcaagctcacggagacccaagtgaagatatggttccagaacagacgctataagactaagcgaaagcagctctcctcggagctgggagacttggagaagcactcctctttgccggccctgaaagaggaggccttctcccgggcctccctggtctccgtgtataacagctatccttactacccatacctgtactgcgtgggcagctggagcccagctttttggtaatgccagctcaggtgacaaccattatgatcaaaaactgccttccccagggtgtctctatgaaaagcacaaggggccaaggtcagggagcaagaggtgtgcacaccaaagctattggagatttgcgtggaaatctcagattcttcactggtgagacaatgaaacaacagagacagtgaaagttttaatacctaagtcattcctccagtgcatactgtaggtcattttttttgcttctggctacctgtttgaaggggagagagggaaaatcaagtggtattttccagcactttgtatgattttggatgagttgtacacccaaggattctgttctgcaactccatcctcctgtgtcactgaatatcaactctgaaagagcaaacctaacaggagaaaggacaaccaggatgaggatgtcaccaactgaattaaacttaagtccagaagcctcctgttggccttggaatatggccaaggctctctctgtccctgtaaaagagaggggcaaatagagagtctccaagagaacgccctcatgctcagcacatatttgcatgggagggggagatgggtgggaggagatgaaaatatcagcttttcttattcctttttattccttttaaaatggtatgccaacttaagtatttacagggtggcccaaatagaacaagatgcactcgctgtgattttaagacaagctgtataaacagaactccactgcaagagggggggccgggccaggagaatctccgcttgtccaagacaggggcctaaggagggtctccacactgctgctaggggctgttgcatttttttattagtagaaagtggaaaggcctcttctcaacttttttcccttgggctggagaatttagaatcagaagtttcctggagttttcaggctatcatatatactgtatcctgaaaggcaacataattcttccttccctccttttaaaattttgtgttcctttttgcagcaattactcactaaagggcttcattttagtccagatttttagtctggctgcacctaacttatgcctcgcttatttagcccgagatctggtctttttttttttttttttttttttttttccgtctccccaaagctttatctgtcttgactttttaaaaaagtttgggggcagattctgaattggctaaaagacatgcatttttaaaactagcaactcttatttctttcctttaaaaatacatagcattaaatcccaaatcctatttaaagacctgacagcttgagaaggtcactactgcatttataggaccttctggtggttctgctgttacgtttgaagtctgacaatccttgagaatctttgcatgcagaggaggtaagaggtattggattttcacagaggaagaacacagcgcagaatgaagggccaggcttactgagctgtccagtggagggctcatgggtgggacatggaaaagaaggcagcctaggccctggggagcccagtccactgagcaagcaagggactgagtgagccttttgcaggaaaaggctaagaaaaaggaaaaccattctaaaacacaacaagaaactgtccaaatgctttgggaactgtgtttattgcctataatgggtccccaaaatgggtaacctagacttcagagagaatgagcagagagcaaaggagaaatctggctgtccttccattttcattctgttatctcaggtgagctggtagaggggagacattagaaaaaaatgaaacaacaaaacaattactaatgaggtacgctgaggcctgggagtctcttgactccactac

SEQ ID NO: 48626 - DNA, 1871 bp, Homo Sapiens
aacccaagaatatatattgaatcttttccaacgttatgttgatgaaggtttacattttatcaataaaaagtgcagccaagcaattccacaagtggacatcagcaaagttactacactctgttgcttattggagtccttgatacttgggaaagatggagttaacttggcaatggaacaaacaaaattgaacactatactatgtcagacttttgtattctgttatttgtggtctttgggtggaaacctaactgaaaactactatgattcttttgatacatttattagaacacaatttgatgataatcctgatgccaggcttcccaattctggtgatctgtggagcattcatatggactttgacaccaaacggctggatccctgggaacgaatcatacctactttcaaatacaaccgagatgttccattttttgaaatgcttgtccccacaactgacacagtgcgctatgggtatctaatggaaaaactactggcagtcaagcattccgtgttgtttactggaataactggagtgggcaagtctgtgattgcaaaaggattgctaaataaaattcaagaatcagctggctatgtccctgtttatctaaatttttctgctcaaacttcatctgcaaggacacaagagatcattgagtcaaaactggagagaaaaagaaaaaatattctaggagcaccgggaaacaaacgaattgtgatttttgttgatgatttaaacatgcccagactggatcgctatggctctcagcctccgattgaattacttcggcagtatcaagattttgggggattttatgacagaaacaaactgttttggaaagaaatacaggatgtaacaatcatatcggcatgtgcacctccaggcggtggccgcaaccctgtgactccccgcttcatcagacacttcagcatgctgtgcctcccaatgccctcagagcacagtctgaaacagatttttcaggccatcttaaatggtttcctgagtgactttccaccagctgtaaagcaaactgcatcaagcattgtagaagcctcagttgagatttataacaaaatgagtgttgacctcctgccaacacccgccaagtcccattatgtctttaacttgagggacttatccaaatgtgtgcaagacaaacattttggaattgcaattgacctggaatattttttgaataagcccatcatatttggagatttcattaaggcaaataaagctgatcggatttatgatgacatgcctgatatagagaaaactgcaaatgttctacaggactatcttgatgattataatctcacaaatcccaaagaagtaaagttggtgttcttccaggatgctatagaacatgtttcaaggattgctcggatgatacgtcaagaaagaggcaatgccctgcttgttggagtaggaggcacaggaaagcagtcactcacgagacttgcagctcatatatgcggttacaaatgtttgcagattgaactcagccggggatataattatgatagttttcatgaagacctgaggaagttgtacaaaatggctggtgtagaagacaagaatatggttttccttttcactgacacccagattgtagtggaggagttcctagaagatataaataacatcctgaactcaggtgaagtgcctaatttatttgaaaaggatgaactggagcaggttttagcggccaccagaccaagagcaaaagaagtaggaatttctgaggggaacagagacgaggtaggatgtgccagagtagttatgtggctttatcacaaaaacgtttcttcaccttttatttaaccattcattgattgcctgaaggggtccatgaataaaatttttttcaatataa

SEQ ID NO: 48627 - DNA, 1997 bp, Homo Sapiens
taactcatgaaacttgagaacacgagaacaacaaaaatactttccttgaacattttcagctagaatgacacggcattctcctacataaaacattataattttcccactactccaaaggaatccaataaataattttacagtgaaggggcctggatcaaaactggcagtgacacctggcccctgacaagcctgagtcacaggtccctgtgcaggtcccagcgtccagtcctccaagaaccagcactgccggagcctcgctgtggtttcttccttccccgatgggaccagctggaatttccaagctgcttcacagaggccaaagatgacaacacgagaggtggtcaaagccaaggtttccctgcgctgcctttgtcttcttcccatggcctggcctgagtgctgcagctgggccccaggagatgagctcctcgcccaagctggagagcatccgctgcacccgccatgccgggaagagctcgggtgggctttctccatagcaattcttcgcaatggggtcccaatcggtgggatgaggccctgggatgaggtcctgcatttggccggacatgactcaatactgatcttcgactgccatgaagaggttctggaacaccacgatgctccaggagaagctcctggctgggctgcaggcagcaagagacatggccagcagccgtcacagcagcactgcttcacactagggctgtggacgttacagccctgcaccagcaaatccctcctctcgcaaacatagcctggttcatccacgatgaggagcttcccttgcacagagttctggcactgattccacgggtgactgctactgcccaggttaacctgcactttgcacgggctgggctggtcgtggtcttgaacctggaggagagtcctatgtctgactcccgctcttcctgcctgaaggtgctgctgaggacatggatgaggatatctgggcaagggccccacatgcccagcagccccatccttgtgaatgattatagggagaaaagcattttccaggccaatggctcactccaggtgccaggggtcatgtcaatttgctctggaaaatatgtcacatcagtagcagcaggtgcagttggaatagccacctgctgagctttgtgaaaatccacaggcgttctccaaggatgcccgccttgcgcctcgcccagctagggagtcaggtgggggctgtgctggggatcaccagccctgcatcgttcacatcttttgggggtagcactaaccttggcattttcaccagacatgcagatttgagttcattaacctggtaggaaagaaaaattgcagggcttccatttaactttttataccatgacagccgtaaccctgtgggtcacagagctgatgtgagaatgccgccggtttctgggatgtctttttagctacacactcaggagcttgcaaagtgaccacaggcaggctctgcagaactcccaggcccagctcgagatgaacttggactacagttgcatgatccctgaccgtcagccaccactttgactggtggaccaccatggtgttttggggccccagaatttggcattcaccaaaatcagtgttctgtgggccctgaaagcgcaggatgtcgcccttgtctggagcaccccactgaaggggcagtggctcccgtggggaaggctgggagggcaagtcctgcacacctgagagcccagggagcccggctttcttgtcaaccacaggtgaggacaaggacaggaacacaaccaaatcagttgcacaactgtgtcttttagggtctgtctcatggcacattctggtgccaagtactgcatctatcagagtacagtcaggaaacagaaaacttaccacatttaagtatttaaaattgtagggcttgcacggtggctcacgcctgtaatcccagctctttgggaggctgaggcaggtggatcactggagtgcaggagttcaagaccagcctgggcaacatggtgagatttcatctctac

SEQ ID NO: 48628 - DNA, 2064 bp, Homo Sapiens
atatctgctttccgcttcatttcgagttcataaatttaaaaagagacagtgagagaaagaaaaagaaaaaaaaaggcaaggcgccgggagcacagtgggtccagggttccatggagaactgcgcaaagcaagttgccaagaaagcccgctggccaagttcgggacctgtccaccacgctcgcgcgctccgctcagcaggcagattccaaaggcttggggcactctggggtgcgcgccgatcttctcgcaaaaggcgagtgtgtggggttcctccttccctcctttccatctgggggtctcggggaaagctgcacccagcgccttgggcgcccatgaagaccagtccatctcagctcaagctcccagcagcagcaacttcggactcagacctctctctttagaacatgagtgcttgtgtgtgcgtgcgtgtgtgtgtgtgtgtgtgtccgagtgcacttcacatttgggggtgcttgtgctctcaggaacgactctcccggctgcccggaacttagagagtttccctttaagccggagatgctgctcggacacccccccgcgtccaacaggaggcgatgacgtctgtagcctcgttgccagaacagtccccaggctaccgctgccgttcattgacaggagcgggcgctcggacgtcagcagccggacctttggcaaggctgctcccgcggagacggctcccacccccgcacctgccagcccgcccccccggggggtggtcacgaaatcaaagccaccagaggaggggcccggggaggtgctggggctgggggagggggatgactcggatctgccctctttgtcctggagcaccggagtatataaatagtgcagtctccagccagactctctcccagtcttgcacgcccccgcagtccccccaacccgacccccgccccttgtcactacgtgtcgggctcgctctgcctggagggaggctggggtgcggggaagcagggagtgcaaacagacattggttctctttcctcttcccattcatacatttctgttggagtcctagggccgccgcgccgggagtcgcaatgaatggatggatgcccgcgcgctgggaccaccaggtccgcagagatgtcgccggcgctaggggcgctcctcccgcgtggggacaggcgccctcgcctaggcgcagtgtggggggaccccaaaagacccttaagaggccaaaggcctgctctccccgttctccccaacacacaccaggggtcttttctgccccggagaagttgggacgcaaaacgtagggaactgcgctcagtctccgcaccacgaagagtcgagatggggaccgagaccagcacggacggtagcaacagagaggggagcgcccaagtggcgcaacgttgtggctgaagccaagcctgtcgcctccccctgagtaccgctggcggcccaggaccgtgcgctctcccttcctgagcacccagggatgcactgcgcagggaaggagggcacggcgggagggtgcttgcaggggactgctgcgcggattccccatccgcacccggctcgcggggaatccgtgggcttgcactcgccagaaagagctgctgcaggagcagccggatggtgaggcccgttcccgaccctgggtgggaggaacttaaagggctgagttctgaggcgccaggcacagggcgcagcttcataaatgcacccaaaagcttccatggacagacggcacagatgtcgctgaagtgaacctaaggaagtttgctaccccaagacccgggcttcgcgccaggtgacaacagacgtctgggagtgtggtgacacctgcgcagagtccctggtggttcaacctgtccgagaaggttgcaagaagatgccactgtcttacctttctcccctagtgctcatgccccagaaaaggccactgggtcactagatcccaaccccttgtgccatgagagggaagcctgcacaacggcgttggcactcccccataaatcgtctcctgggtccttcccattacgcacacacataatgtcatttctccagggaaaaataaataacaactttcttgac

SEQ ID NO: 48629 - DNA, 1331 bp, Homo Sapiens
agctctcacccctccagtgccgacggtagcgaaagactttcctccaggggcttcctcactggggaattgccggaaagagcaaacaaaaaaggcgctggtgtaggctccaaaataaacacatctgaattcatgatggcatcgacagaggctcttattggattaaaagtttcaaaacaaacaataacgctttggaaaaagggttgaatgcaccctcaggcacgaccatggagaaaggtgggaacatacaattggagattcctgacttcagcaactctgtcctgagccatctaaaccagttgcgcatgcagggccgtctctgtgatattgtggtcaatgtgcaaggacaagcttttcgggctcacaaagtggtgctggctgccagctccccctatttccgggatcacatgtccttgaatgagatgagtacagtctccatttcagtcatcaagaaccctactgtttttgaacagctcctttctttctgttacacagggcggatatgcctgcaactggcagatatcatcagctacctaacagctgccagttttctgcaaatgcagcatattatagacaaatgtacacagatcctggagggcattcatttcaaaattaatgtggctgaggttgaagcagaattaagtcaaacaaggacaaagcatcaagagagacctccagagtctcacagggttacaccaaatctcaaccgctcccttagcccacgacataataccccaaagggaaaccggcgaggtcaggttagtgctgtgctggatatcagagagctaagtcctcctgaggagtccaccagccctcagatcattgaaccaagttctgatgtagagagccgggagcccattcttcggatcaaccgagcaggacagtggtatgtggagacaggagtggcggaccgtgggggtcggagtgatgatgaagttagagttcttggagcagtacacatcaaaactgaaaatctggaggagtggcttgggcctgagaatcagccttctggagaagatgggagtagtgcagaggaagtaacagccatggtgattgataccacaggccatggttctgtaggacaggaaaattatactttagggtcttcaggagccaaggtggctcggccaacaagcagtgaagttgacagatttagcccctccggcagtgttgttcccttgacagagagacacagagccagaagtgagtctcctgggagaatggatgagcctaagcaacccagctcccaggtatggagttgtggatttagaactgctttggtggttggaggaattgctactgtgtatgaatagaaaataatgaaaaagaaaaga

SEQ ID NO: 48630 - DNA, 495 bp, Homo Sapiens
cccaagaaacatctcaccaatttcaaatctgatctattcggcttagcgactgaagattgcccgatcgcctcggaagtcccctggaccatcacagaagccgagcttcgggtaactctcacagtggagggtaagtccatcccctgtttaatcgatacgggggctacccactccacgttgccttcttttcaagggcctgtttcccttgcccccataactgttgtgggtattgacggccaagcttcaaaacccctgaaaactcccccactctggtgccaacttggacaacactcttttatgcactcttttttagttatccccacctgcccacttcccttattaggccgaaatattttaaccaaattatctgcttccctgactattcctggagtacagctacatctcattgctgcccttcttcccaatccaaagcctcctttgtgtcctctaacatccccacaatatcaccccttaccacaagacctcccttcagcttaa

SEQ ID NO: 48631 - DNA, 872 bp, Homo Sapiens
ctgaccttcttgtctgagccaggccaccaaagccatgccacgacaaggacaagatgagcagcaaacaccagctcctcagcttcgtgtccctgctggagaccaacaagccgtacctggtgaactgcgtccgcatccctgccctccagtccctcctgctttttagccggtctttggacaccaatggtgactgctcccgcctggtggccgatggctggctggagctgcagctagcagacagtgaaagtgccatccgactcctggcggcttccctgcggctccgtgcccgctgggaaagtgccctggaccggcagctggcgcaccaggcccagcagcagctggaggaggaggaggaggatacgccagtcagccccaaggaggtggccaccctgagcaaggaactcctgcaattcacggcatccaagattccttacagcctccggcggctcacagggctagaagtccagaacatgtatgtgggaccccagaccatcccagccaccccccatcttcctggcctctttggcagctccaccctgtccccccaccccacaaaggggggctacgcagtcactgacttcctcacctacaactgcctcacgaatgacacagacctgtacagcgactgtctccgaaccttctggacctgcccccactgtggcctgcatgcgcccctcacgcccctggagcgcatcgcccatgagaacacctgcccccaggccccacaggatgggcccccaggggctgaggaagctgccctcgaaaccctccagaagacatctgtcctgcagaggccctaccactgcgaggcctgcgggaaggacttcctctttacacccacagaggtgctgcgccaccggaagcagcacgtgtga

SEQ ID NO: 48632 - DNA, 1440 bp, Homo Sapiens
atggcagcggccagagagccggagttgccgcaggaagcccccgccacggaacccgcgcccccgccggcctgccgcttcttcctggaaggccgctgccgcttcggcgcccgctgccgccagccccaccctggggcgccggcgccgcctggccgcgaggcgcagccggaggccggggccaagaagccgccgctgcgcacagccgcggacgtcatccagcgcatccgctgggacccgcgcctcgaccccgccgacttctcggtgggctacgtcgaccgctttctgggtgtgcgcgaggagcccttcagcgccttttgctgggaccagccgctggcggcgctcgggccgggcgtgctggcagtgccccagcaccgcgtgcgcttcttccgcttccatggccgccttgtgtgggaccgcgcctcgcgcaccgacctcgtctttggctctggctcggcggcgggacgcgggcccaccatcctggacgcaccgaacaccgagggcgcccacggggcagagggtgccgagtggacactggcggggacaggtcaggaggcccaggctgcccccaagcgagggagcacaaggccgctctgcacagggcaccaggaaccaggcgtggaggaacccggagagctggaggcggcccaggagagggcgctgggcacagctgctgatttgggaacactggccccaagaggacgcctcgccggagtgactgaggaggcactgaagccaacagcagccaccaggaccacattgctggggggcaaggaagcacaggccctgggagtcccggggggctccgctgagacgacagaagccgagtggggtcctgcggcctggcccgaggacaaaagggcccgccttagtgttgcagccccttgccaaccgcgccccacacattttgtggccctcatggtgaccgagcctgggctacaagcagaagtgaccaaggcccaggaatacctggtccacgtggccccacactgcgccaacttcctagtgccctctcagaacctacacctgaccctggccctgctgcgactggcaggcgctggggaggaggccgctgccattggagctctgagacgggccctcttggccccggggctaaatgcaccccctcggctgagctttagaaagctggtcctcctgggcccgcatgtgctgtgtgccccaccctctcccacactggaaagcatggcacaagtgctgagccagaggctggaagccgaggggctgagtacactacagtctccagggcagctgcacccccacctcaccgtggccaaggtgccccatggttcccaggtccacctccccaagctggagttcaccctcagccaggaagtggggtgccagcccctgcagacactctggctgtgccgtatagggaggacaggggggcctttccagcccctggctgagatccgcctggagtga

SEQ ID NO: 48633 - DNA, 869 bp, Homo Sapiens
gaaggctcttacagcatggccgccggtactgcagctgccttagcgtttttgagtcaggagagccgaacgcgggccgggggtgtcgggggcctacgggtcccggccccggtcactatggacagttttttcttcggctgtgagctctccggccacacccgctccttcacctttaaggtagaggaagaggatgatgcggagcacgtgctggcactaaccatgctctgcctcaccgagggagccaaagacgagtgtaatgtggtagaagttgtggcccggaaccatgaccatcaggagatcgcagtccctgtggccaacctcaagctgtcctgccaacccatgctcagtctggatgacttccagctccaaccacctgtaaccttccgcctgaagtcgggctctggccctgtgcggatcactgggcggcaccagattgttacgatgagcaatgatgtttctgaggaggagagcgaggaagaggaagaggacagtgatgaggaagaagttgagctgtgccccatccttcctgccaaaaagcaggggggcaggccctagccctcctaggtcagctccatgtgccatgcaccgccatgcaccctgttccctgacaagtttcaacaattgtaaatatttcttccttgaagaggagagcttgggtgggggttgggtgggagggacttgggtctttggtgctaggagagggcctgtgctccacacagccgtggttttctgattttcaccatgcccggggcctcccttcccacctgcctgtgagaattggaggttagtgcctgaagctcagagctacacatttttaatagtttttacatttttggataaaggttgaaataaagtggtgtggagtttttgca

SEQ ID NO: 48634 - DNA, 874 bp, Homo Sapiens
cgtcggcacgtcggccctgcctcccggaccaccctgcggggcgcaccagcgatctggggtgcggggctcggcctccctgcgctcctggctgaccgtgtgaccttgggcaagaccgagacgtgcagctgtccaaggctctgtcctatgccctgcgccatggggccttgaagctggggcttcccatgggagctgatggcttcgtgcccctgggcaccctcctgcagttgccccagttccgcggcttctctgctgaagatgtgcagcgcgtggtggacaccaataggaagcagcggttcgccctgcagctgggggatcccagcactggccttctcatccgggccaaccagggccattccctgcaggtacctaagttggagctgatgcccctggagacaccgcaggccctgcccccgatgctagtccatggtacattctggaagcactggccatccatcctactcaaaggcctgtcctgccagggaaggacgcacattcacctggccccaggactgcctggagaccccggtatcatcagtggcatgcggtcccattgtgaaatagctgtgttcatcgatggacccctggctctggcagatggaatacccttcttccgctctgccaatggggtgattctgactccagggaatactgatggcttcctccttcccaagtacttcaaggaggccctgcagctacgccctacccgaaagcccctttccttggctggtgatgaagagacagagtgtcagagtagccccaagcacagctccagagaaaggaggaggatccaacaataaaatattaatttataaaaaagaaattttaaaaagtaacaagaaagaactcgtttgaaaccatgtttcatcatcctgta

SEQ ID NO: 48635 - DNA, 633 bp, Homo Sapiens
atgggcagagcacctgaggtctgcagtcagcagccccgggtgatgcctcctgggaaggggcccagacttgggggtaacggcgtcactgatgtgggtccctggccccactgtggggtgtccagggttgtgcctattggaccgcccgcctcaccatcccacgctactgagcctccttcctcagccattgtccagcttcgtgtcaagtcctggcgtggggctcaccgcctgccccttgaccgtggagttcggacgcgtctcacagtgagtgccccagcagagcagggttgggtgctgagcatcagcagctctgccagagcaagtggcaattccctggaacctggggtcttgcctttgtttggagaccgagagactcacagtgtgggagggtcacaggacatgtcatcagcagtgaaaaggttttgttccgtttcctgccttcagaacttgcacgtgctggaatccaaggatgggtgggagaggggccgttcctggagatgtctgcccttcggggctggcccatgccacaggacctcccatcacccctgctgctggttggtgaattcggggcatgctgagcctttcccttgcagcctttgcacttgctactcttccctccgcttatcaaactcctaa

SEQ ID NO: 48636 - DNA, 1857 bp, Homo Sapiens
ccgccgcagccgccgcagcagcagcagccgccgccccaggccccccccatggagcccgaggccccggattcccgcaagaggcccctcgaaacgccccccgaggtggtctgcaccaagcgcagcaacacgggagaggaaggcgaatacttcctgaaggtgctgatccccagctacgcggcgggctccatcattggcaagggcgggcagaccatcgtgcagctgcagaaggagaccggagccaccatcaagctctccaagtccaaagacttctaccccggaaccacagagcgggtatgcctagtacagggcacggcagaggccttgaatgctgtgcacagctttattgccgagaaggtccgagaaatcccacaagcgatgaccaagcctgaggtggtcaacatccttcaaccccaaaccacgatgaaccccgacagagccaagcaggccaagctgatcgtccccaacagcacggcgggcctgatcatcggcaagggaggcgccacggtgaaagccgtgatggaacagtcaggagcatgggtgcagctgtcccagaagccggagggcatcaacctgcaggagcgcgtggtgacggtcagcggcgagcccgagcaggtgcacaaggccgtgagcgccatcgtgcagaaggtacaagaagacccccagagcagcagctgcctcaacatcagctacgccaacgtggcaggccccgtggccaactccaaccccaccggctctccgtacgccagccccgcggatgtgctgccagccgcggccgcagcgtcggccgccgccgcctccggcctgctgggccccgccgggctggctggcgtgggggcctttcccgccgcgctgcccgccttctcaggcaccgacctgctggccatcagcacggcgcttaacacgctggcaagttacggctacaacaccaactccctgggcctgggcctcaactcggccgcagcttccggcgtcctggccgccgtggccgccggggccaacccagcagccgccgccgccgccaacctcctggcatcctacgcgggcgaggccggggccgggccagccggaggggccgccccgccgccgcccccgcctcccggagccctggggtcctttgcgttggccgcagccgccaacggctacctcggggccggggcgggcggcggggcgggcggagggggcggcccgctggtggccgctgcagccgcggccggggcggccgggggcttcctgacggcggagaagctggcggctgagagtgccaaggagctggtggagattgcggtgcctgagaacctggtgggagccatcctggggaaggggggcaagacgttggtggagtaccaggagctgacgggcgctcgcatccagatctccaagaagggcgagttcctgccaggcacgcggaaccggcgggtcaccatcacgggcagccccgcggccacgcaagccgctcaatacctcatcagtcagcgggtcacctacgagcagggagtgagggcctcaaacccccagaaagtgggatgaggcctgtggtgtgtgctcccacccttttctctcctcccatctcctcctcttccctctcctcctcccccccaactcctgacctcagcttggtgtagtcctgctcctcttgggatggggctggggtaggcccgactgcaccctccccttctggtagtcataggcaggattgagtgacggttgggaagggggctcagaagccccctccccagcccggaactgacccctccttcctccctccctgtgcttggctgggcctgacccttcctgtcccagggcccaggtctgtgtgatatctgtatatattgcattttgttgattttaatagaaaac

SEQ ID NO: 48637 - DNA, 351 bp, Homo Sapiens
ctggtacaatacttggtgttacgaaaggatctatcacaagctccgttctcctggccggcgggcgcactggtagcgcaggcttgtcacgcggccaccgcggccttgcacactcaccgcgaccacccgcacacagccgcttacctccaagagctggggcgcatgcgcaaagtggtcctcgaggccccagatgagaccaccctaaaggagctggccgagaccctgcaacagaagaacattgaccacatgctgtggcttgagcaaccagagaatatcgccacttgtattgctctccggccctaccccaaggaagaagtgggccagtatttgaagaagttccgattgttcaagtaa

SEQ ID NO: 48638 - DNA, 1909 bp, Homo Sapiens
ctgtggtgtagctttgctgtctcctgtgtcaatgtcaggaggacaggctgagctcctgggaccagaacccctcagattccaggaggagcagagaaagcacagatggcctggagagtcccaggggtgaggccagcaagtactttcttcccccaggtgctcagagcatcctctgagttgccaaacagactcccagaggggtcaactgtgggccctaaaccagacagcagctgggaagcaggctctcaggggaactggggtctcaccagctcaggagcaggccaggactcctcagcacagaagctgggaatcttgagtgtccagatcagcctgaaaatctggacttgggaaaagccatctggctggggccacctgcatgccgctgtgactggggcatcctgctgctctcctctctcacaaggtggtgccatctgccttgtcactgctcctcaggacaagcctgactgctctccctgcacctctggccattgagaatccggctgctccatcgtggtggaaaatcttccatgctcagagggacaccttccgacactggggttctggagagcctggtgccacgagacaaggagccatgtgacaagagggggaggggtaggagtgggagacacaagtgtggtttgggacaaaatagggcctgaggctcacgtgttataaaaccccctttgctctgcctgtctccttgaattgtggccagtttcacatgggaagcaacgtcgagggacagggagactgcaggtgaggcctcagggctctgcattcccatccccaaaagtcaccagcgtgtggccttgtgggtgtcactcccctctgtggagtcaactttgtgcagtgacatgcagaggctggactgctgccacctcatgcccctcctggcatgatggtcgcatgaggctgagtgatttgcaggtctatggggaaacccgcctcagagatgtggaggagaagccaggcagagcgctgttcattccatttctttctttttttaatctaaaggagggaaagagctttattaactcaaacaaagggatgccatacaacttcccaacgatactgtgcagtgatggtattagcttccacctgttcttccattctgggggcagggtgtgaggactggctgctctgggagacgctctgagctgagagagaagaaatagctatgctaatagctgccccttactgagtgctcactctgtgtccggggctacaccgagtgcttgcagcgggttctcaggcgcacttagaacagcactgtgagaaaggcacttttgctgccccttgtgtacagatgaggacaaagagggacagagaggtttagaaccttgacctatatcacacagccagtgagcagacgaccggaatttgaatcctgcaatctctctgcagagcctgcgcatttaataccacacacagttctggcctgcagtgaatttggttgttcttcctgcctggggtggtcagtttccaagcctttccagatggacttctgcagcccaaagctgcgtgctccccgtgcaggcccttgtcagagcagagaaagatggctgaagttgttgtccatctagatttttatcttcaaaacattgctgaaatcaatctctcttctaccgtctccgatttcctttgtccttatgggtggtctacaactttactatcattttagtggatgcaagaggagtggagataaacacgtgttcagcctgctgtgaatctctgcagtggctatgttgtttcttaaacagatgtaatgaggcatctattccctgtgtgccatgtgccccttgagtaggggacatctgttttgtgttgtctgtgtctccagcattagaatggaacctggcacacaatagaggctcaattagtatttgttgaataaatgaacattaagaaacag

SEQ ID NO: 48639 - DNA, 255 bp, Homo Sapiens
ctctgtgttagtggattcacaagcaacctgtactcctcaaagaaagatgataagatgaaggagatctctagaaccagcaactggggctcttccttcagtgaaaaaagtgggtgtatgcagactcatccatccatgaatctagattgcagggatgtgacctatgtaatgaacttgctacttattgcttcatcatcttcttcaatgacaaaaaagaaaatagtaacaatgaatacgtctcttgggcaaaataaataa

SEQ ID NO: 48640 - DNA, 586 bp, Homo Sapiens
ggaagcagcgggcagcggcccgcgggaggcacctcggagatctgggtgcaaaagcccagggttaggaaccgtaggcatgctgcgccccaaggctttgacccaggtgctaagccaagccaacactggaggcgtccagagcaccctgctgctgaataacgagggatcactgctggcctactctggttacggggacactgacgcccgggtcaccgctgccatagccagtaacatctgggccgcctacgaccggaacgggaaccaagcgtttaatgaagacaatctcaaattcatcctcatggactgcatggagggccgtgtagccatcacccgagtggccaaccttctgctgtgtatgtatgccaaggagaccgtgggctttggaatgctcaaggccaaggcccaggctttggtgcagtacctggaggagcccctcacccaagtggcggcatcttaacggcattggtggaagctggggtcagaaaagagaaatgaccatttggaggggcggggcctcctagaagaaccttcttagacaatggggggaggatgggactttgttttttccaagaataaacttcaactcctg

SEQ ID NO: 48641 - DNA, 855 bp, Homo Sapiens
tatgattccacccatggcaaattccatggtacagtcaaggctgagaatggaaagctcgtcttcaatggaaatcccatcatcatcttccaggaccaagatcctaccaaaatccaatggggtgatgttggcactaaatgtgttgtggagtccgccagtgtcttcaccgccatggagaaggctggggctcatttgcagggagccaaaaaggtcatcatctctgccgcctctagtgatgaccccgtgtttgtgatgggcgtgaactatgagaagtatgacaacagcctcaagattgtcagcaatacctcctgcaccaccaactgcttagcacccctggccaaggtcatccatgacaactgtattgtggagggactcatgaccacatttcatgtagtcactgccacccaaaagactgtggatggcctttccaggaaactgtggcatgaaggccgtggagctctaaagaacatcatccctgcatctactggcactgtcaagaacaggggcaaggtccctgagctgaatgggaagctcactggcatggccttctgtgtctctaccgccaaactgtcagtcgtggacctgacctgctgtttgggaaaaactgccaaatatgatggcatcgagaaggtggtggggcaggcatcggagggcccgctcaagggcatcctgggctacactgagcaccaggttgtctcctccgaattcaacagcaacacccactcttctgctttcaatgtcaatgagggcaatgacattgccctcaacaaccactttgtcaagcttatttcctggtatgacaatgaatttggcaacagcaacagggtgatagacctcatggtccacttgacctccaaa

SEQ ID NO: 48642 - DNA, 1265 bp, Homo Sapiens
cctcaggtagctcagagagctgcgctggaggagaaaagccagtcctggcaggagctctggtacctgggaagctggatggagagcctgggccagaatcccggacccctcacctctgcggcctagctttgtgaccttggcaaatccattctatgcacctccatttcctgtacagtggggatccttatttctctggcacagattggtatttgttctgtaaagcccagtaccactttattttattttagttattgatttttttgagacagggcctcactctgttgccaaggctggaatgcagtggcgagatcatagctcactgcagcctcaaactcctgggctcaggccatcctcctgcctcggcctcctgagtagctgggacgacaggcgtgcaccactgcgcctagctccagtaccatgtttaaacggtgctcagaaaacgtgctaaacttggtggatgggaattgaaaagagatttaatgttttaaaaatcaaagtcactcagctgcagtgccacatgggaaggaggcctggatgtgaatgttcctgggagctgagagctcctgtgactgtcgccagtttcctgtggtctcccacagactcaggacatctccctctgctccaggacacctcaggaccaccagagggcactcatcgcaccttcacccctggaagggagctggtcctggggccaaaacccactgtgcctgggaagcccttcctggcttctgctctcctcaatgtatgacagccctgatttacccccagggactgttgccactcggggttgtagagtaatatgtaaccagactggagaaccacagcaatgctctctcctctgcccatcacctccccttggcccctccctcttcatcagccccattttggagaagggagaaagaagggagaggcagcagtctcctcccaggtggggccggactccagggaaggagaattttcagaagttgctggagttgccgaatctgtcagggcccagggttcacagagcagtgatggaggagaaaggagaggaagcagatctaagcacacatgggcatcaaaccagaggaacaaagtcacatgcagagggctgcacatagacacagggaaacacacacacggagatgcacagaaacacgcagaccccatgcagggacctgctttcccgccacagaggaaagcaatctgatcaaacagacccactgtgcacccagccctccatgcttggggacaacacacctacaaaaatataagaaaaaaaaggaaaa

SEQ ID NO: 48643 - DNA, 1281 bp, Homo Sapiens
atgcagcggccgctgagggtggcgcaggggccccggccagcccggggctgcagcagtgcagacagctccagaagctcatcggcatctccattggcagcctgcgcgggctgggcaccaagtgcgctgtgtccaacgacctcaccgagcaggagatacggaccctggagcattgtcccaattccttcttctaatgaagaaatacgcttagttgatgatgcgtttggaaaaatttgtcacatggtcagtgatggctcttgggtggttcatgttcaggcagcaaaactgttgggctctatggagcaagtcagttctcatttcttggagcagacccttgacaagaagctgatgtcagatctgaggaggaaacgtactgcacatgagcgtgccaaggaactttacagttcaggggagttttccagtggcagaaagtgggaagatgatgctcccaaggaagaagtagataccggggctgtgaacttgattgagtcaggagcttgtggagcttttgttcatgggttggaagatgagatgtatgaggttcgtattgctgctgtggaggccctctgcatgttggcccagtcttcaccctcttttgctgagaagtgccttgatttcctagttgacatgttcaacgatgaaattgaggaagtacgtctgcagtccatacataccatgagaaaaatctctaacaacatcaccctccgagaagatcagcttgacactgtcctggctgtgctagaggattcatccagagatattcgagaggctcttcatgaactcttatgctgtactaatgtttcaaccaaagaagggattcatcttgcattggtggagctgctgaaaaatttaaccaagtaccctactgatagggactccatatggaagtgcttgaagtttctgggaagtcggcatccaaccctggtgcttcccttggtgccagagcttctgagcacccacccattttttgacacagctgaaccagacatggatgatccagcttatattgcagttttggtacttattttcaatgctgctaaaacctgtccaacaatgcgagcattgttcaggcactatgcctacctccgagacagtctttctcatcttgttcctgccttgaggttgccaggtagaaaactggtgtcatcagctgtttctcccagcatcatacctcaagaggatccttcgcagcagctcctgcagcagagccttgaaggagtgtgtagtcttcagcacttggaccctcagggagcccaggagctgctggaattcaccatcaggtag

SEQ ID NO: 48644 - DNA, 735 bp, Homo Sapiens
gcacgatacaaccgcaccagctacttctaccccacattctcagagagctcggagcacagccatctgctcgtgtcccccgtgctggtggcgagtgccgtcataggtgtggtcatcatcctctcctgcatcaccatcattgtgggcagcatccgcagggacaggcaggcccggcttcagcggcaacccataaggaccatccctggatcctggtctgaggcccaggccggtggtctgttccctgcagtgtcggacgagcacacatacagccgctcaagccgcaggatgcgctatgcctgcagctcctcagaggactggcccccacccttggacatcagctctgacggggacgtggatgccacggtgctcagggagctgtacccagattctccaccaggctacgaggagtgtgtggggccaggggccactcagctgtatgtccccacggacgcaccaccaccctactcgctgactgattcctgccccacgctggatggcacctccgactcaggcagcggccacagccctggccgacaccagcaggagcagaggaccccggcccaaggtggccttcacacggtctccatggacacccttcccccctacgaggctgtgtgcggggctggccccccatcaggcctgctgccactgccgggcccagacccagggccaaggggctcccagggctcacccaccccaacccgggccccagcctctggcccagagaggattgtgtga

SEQ ID NO: 48645 - DNA, 1620 bp, Homo Sapiens
agtgctgaaattaacacatttacctcccctgccaagttatggtcttgatctttgtgagtttccacttgattatacatctcagagattttatatgatgcaaggaattgtgattgcaatgacaactataaccaagtatacacaaggggcaagatttctttgttcagatgaagcatgccctctttcaaaaggatttcagtatataagagtgcatgtgcctggtgctacagaatctgcaacgataagaaatgactttttgtgtaatctatgtgcatcttcacttcaagaagacagaaaatttagagtacttggtgataaacaaatagttgaaataattgccacaaaggcacttcgtgcttttcaaggatattctaacaaccagccatttaggtttcaatcacttacaattttcctaagagatgaatcagtgaataaaatgaatataggaaatgaatataaaattattggaattccaacctgtgtaaaaacctcacaaactgctgtctgtatagaagcaaatagcataactttttgtaattcaaaagttccttcaggaattagtgacaacttcaggtgtctcctctccttaacttccagctcatgctggaagtttacagcaatacttgccaatatctttgcatcacaaattacccctcctgggacttacaatttgctcaagctctgtttgttgatgagtctagtacagacaactgaccgtaacaaggaactggaagattgcctggatattttaattataacaagtgatactctactcatagacaggcttctgaattttagcataaaccttgtcccccgtggtatacgtcatctagtctctactgaaatttttcccactctatccaggaataagtatggaactggagcagttagcattcaggctggcagtgctttgctagctaaaggtggtatctgctttataggagacttggcttcacacaaaaaagataaacttgaacagcttcaaacagttctggagagcagaagcatcacagtgtacatcccaggaaagaagtttggggaggatattgatcaacagatgacttttccatcagtgcagtttttggtcttttgttgatgtggattcatcttcaaggagaaatgcacagaaaatcaacactctaattggtcagatggattgcagtttgattccagctaaccttgtggaggcatttggtttattgattaactgcaacgagtcatctccctgccacccatttcttcctactgtgcaacacactttgaacaaagccattaatcctgaagggctgttttatgcggcttctagacagttcacaactgaagattttgaaaagctattggcttttgcaaagaatttgaatgtagaattcagcttggaagcagaaagaatgacccatggctattatctagcaagtcgcagaatcagaacaggctctgtatgtggatcaaagctgtcagcatctgcattaaaatatctcgttttcctatctgaagcccatgcacgactgaacttaaggaacaaagtgcttaaagaagatgtgctgattgcagccttactatttgaaacatccctcacattgaaatatggtaatgaattaaattattaatgatcactacaaataa

SEQ ID NO: 48646 - DNA, 405 bp, Homo Sapiens
atgtggggtagaagaagaaaacttcgaaggcttaatgatgtcaccatttctacctgccacgtatcggcgaaggttgggactcgactggtgtttgatcacgatgggaaaatcatccagaaaaccccctacccccaccccagagggaccacagtcagcgtgaagcagttattttctacgctacctgtgcgccataaggaatttcaaaggaatattaagaagaaacgtgcctgcttccccttcgccttctgccgtgattgtcagtttcttgagggctccccagccatgcttcctgtacagcctgcaaaactgactcctagaagtaccccaccccacccctgctccttggaggacaacgtgatcactgtattcagctctgtcaagaatggtccaggttcttctagatga

SEQ ID NO: 48647 - DNA, 750 bp, Homo Sapiens
tttagggacttgggatttaacagagctccctacaggagtacctgcctccttcagcccactagtagtgcgctggtaaatgctatggaatggccaccttttgtggtgacattggatgaagtagagctgatttactttgagcggcagtttcacctgaagaactttgatatggtaattgtctacaaggactacagcaagaaagtgaccatgatcaatgccattcttgtagcctctcttgacccaaaggaatggttgaattcctgcaacctgaagtacacagaaggagtacagtccctcaactggactaaagcaataaagaccattgttgatgaccctgagggctttttcgaacaaggtgtctggtcttttctggagcctgacgatgaggggagtgatgctgaagaaggggattcagagtctgaaattgaagatgagacttttaatccttcagaagatgactatgaagaggaagaggaggacagtgatgaagattattcatcagaagcagaagagtcagactcttctaaggagtcgttgggtagtgaagaagagagtggaaaggattgggatgaactggaggaagaagcccgaaaagcggaccaagaaagttgttataaggaagaagaagaacaaagtcgaagtatgagccagaagaggaaggcatctgtgcacagtttgggccatggctctaaccgtggttccaaccatggttccacacacagctctgcaccccccaagaaaaagaggaagtaa

SEQ ID NO: 48648 - DNA, 327 bp, Homo Sapiens
aatcccggcgggaaccccggctgcggaaggcggctgcggccggcgggagccgaggggaagaatggagcgctgaggaagcgaggcgccagccccagccgcttcgctgccgcggagcctgcacgaccgagaggtcgcggagagaagccagagacaggccagcgacctggcgaggcagaagatctagctatgttacccaggctggatttgacctcctgggctcaagggatcctcctacctcagccccccacacagcagggactacagctgcacaccactacccagctcccttcttcatgtcttacctgtccttattatcacagtgaataa

SEQ ID NO: 48649 - DNA, 812 bp, Homo Sapiens
aaaggactcccaagaactggagctggaaggaacaggagtgtgtttcagcaaacagccttcatccaaaatggaggagccaggcccccgcttcagtcaagacctgcctagaaaaaggaagtggagcaggagcaccgtccagcctccgtgcagccgtggcgtgcaggactcgggtggctctgaggtcgcctggggaccccagaagggacaggctggcctgacatggaaggtgaaacaaggcagcagcccctgcctccaggagaactctgcagactgcagtgccggggagctgaggggtcctgggaaggagctatggagtcccatccagcaggttacagccacatcctctaaatgggcgcaatttgtcctgccacctagaaaaagttcacatgtggacagtgagcagccaaggtctcttcagagggaccccaggccagctggtccagcacaggctaagcaagggacccccagagcacaggcctcaagagaaggcctcagcaggcccactgccgctgtccagcttcctcgggccacacaccccgtcacatctgggtctgagaggccttgcgggaagacctcatgggacgcaaggactccctgggcagagggtgggcccctggtcctggaggcacagaatcctcgacccacacgactatgtgacctctttataactggggaagacttcgatgatgatgtgtgatctgggactggcaggttattaatcgagatacacttgttaggagggacagggttcccctaaggcacttttaaagatactctgtaagaaccattaacaataaacttactgtcaatca

SEQ ID NO: 48650 - DNA, 351 bp, Homo Sapiens
atggcggcggcagctgtcactgggcctagcccggagtgtggacctggggactccccagaagggcccgagggggaggctgagcgtcggcggaaggcgcacagaatgctaaagctttacaacggcctctcgaaaggggaggcggtgggactccccgcggggaccgaccccctggaccccactgatctgaacggggcgcacttcgacccggaagtttacctagacaagcttcctagagagtgccctctggcccagctgatagacagtgagacggacatggcgcagcagatccgggctctagacagcgacatgcaaaccctggtctatgagaactacgataagttcatcccagcc

SEQ ID NO: 48651 - DNA, 702 bp, Homo Sapiens
ttggtaaatgaattgaatcatttgaaagaaaaagaacgccaatatgaaaaaaagcaagcagaaagagaagtaaggtagctgtgagacagctttaacaaaaagatgatgtcttaaacaaacaatcagcaacaaaagctttgctggatgcttcatcgcgtcactgcatctatttagaaaatgagatgcaggattcaaggaagaaattagaccagatgagaagtcaacttcaagaaacacaggatcaacttacagctactataagatgtactaaggggatggaaggcgacgcacaaaagcttgaagtagaaaatgccatgatgagaaaaactattaaaaaacaggatgaccaaattgagcgacttgagaaaatcctgcagcgttcaagtttgatgccacaggtgttcaagagctagatgaaggtgcttgtcctagtaccttagcacatggttgctgaatacatgaatgaagagtgagaaaccagaagctctgatatttaactgccgtgataatgaattcaatgtgcaactatgggcaaattgtatttaatagtaattgcatattgtacatatttttcattcttattaacactgataaacttttcaacttatactgactttaataaaattgtattactaggctattaacatgatattttgtttcccattaaatgtgacatgcaaagacgtttattaaatgaaaata

SEQ ID NO: 48652 - DNA, 387 bp, Homo Sapiens
atgccctctactgaaggctttgggggactggataggctagtcctgcccccacctccccaagtattacccctcctaagtcctgctaggggacgtattcagttcagtggaagaaagagcacaggctcctgggtcacccagatggaaaatctactcctggcccagccgctgcctgatgattgtgagattctgtgtgggtggcgatctctcttgcacctcactttcctcattggttttgcacctcactttcctcattggttttgtaaccatcactgtcatcagcatccgccttcacacctcacagaggtgttgcaaagctcaggcgagctggcacatcaactagcacccagtaggtgctcaatgcgtgcagaaggaactcacagaggatga

SEQ ID NO: 48653 - DNA, 3067 bp, Homo Sapiens
aattaaattatgagaattaaaaagacaacattgagcagagatgaaaaaggaagggaggaaaaggtggaaaagaaaagaagacaagaagcgagtagtggtctctaacttgctctttgaaggatggtctcacaaagagaaccccaacagacatcatcgtgggaatcaaatcaagaccagcaagtacaccgtgttgtccttcgtccccaaaaacatttttgagcagctacaccggtttgccaatctctattttgtgggcattgcggttctgaattttatccctgtggtcaatgctttccagcctgaggtgagcatgataccaatctgtgttatcctggcagtcactgccatcaaggacgcttgggaagacctccggaggtacaaatcggataaagtcatcaataaccgagagtgcctcatctacagcagaaaagagcagacctatgtgcagaagtgctggaaggatgtgcgcgtgggagacttcatccaaatgaaatgcaatgagattgtcccagcagacatactcctccttttttcctctgaccccaatgggatatgccatctggaaactgccagcttggatggagagacaaacctcaagcaaagatgtgtcgtgaagggcttctcacagcaggaggtacagttcgaaccagagcttttccacaataccatcgtgtgtgagaaacccaacaaccacctcaacaaatttaagggttatatggagcatcctgaccagaccaggactggctttggctgtgagagtcttctgcttcgaggctgcaccatcagaaacaccgagatggctgttggcattgtcatctatgcaggccatgagacgaaagccatgctgaacaacagtggcccccggtacaaacgcagcaagattgagcggcgcatgaatatagacatcttcttctgcattgggatcctcatcctcatgtgccttattggagctgtaggtcacagcatctggaatgggacctttgaagaacaccctcccttcgatgtgccagatgccaatggcagcttccttcccagtgcccttgggggcttctacatgttcctcacaatgatcatcctgctccaggtgctgatccccatctctttgtatgtctccattgagctggtgaagctcgggcaagtgttcttcttgagcaatgaccttgacctgtatgatgaagagaccgatttatccattcaatgtcgagccctcaacatcgcagaggacttgggccagatccagtacatcttctccgataagacggggaccctgacagagaacaagatggtgttccgacgttgcaccatcatgggcagcgagtattctcaccaagaaaatggtatagaagctcccaagggctccatccctctttctaaaaggaaataccctgctctcctaagaaacgaggagataaaagacattctcctggctctcttagaggctgtgtggcatttccacaagttgcttcctgtatccctgtggtcttccttgtcacagatcagggctgttccaattacttgtaaactttcatttgtttacaaaggttagaagttatcccatatgtggttccccttcagctgatctttgtctggtgccagacaaagcactttatgagacgagttttttatctgtcagcaatggattggagacatttcccaattgtgtgccagtcacacaaccaaggcttaggaatttctcaggccaccttacctgacatgtcagggcaggtctgtgtctaggtgcatggtcagatttaatacatccagaagatgtcttctattctaacagatctcttagcttgtcactgaggcaaagttttgatttaggagatagggctataaaatgcctggactgttaccttgcatggactgaatatgactcataaaactgatctgattccttcagccatcatctgcccaacttcgttcccctccccacccccccacaacacacacacacactttctaagaaaagaaaagaaattcttttttttcaatactttaagttctgggatacatgtgcagaatgtgcaggtttgttacataggtatacatgtgtcatggtggtttgcagcacccaccaacccatcatctaccttaggtatttctcctaatgctatccctcccctagcccccaaccccccgatgggctccagtgtgtgatgttcccctccatgtccatgtgttctcattgttcaattcccacttatgagtgagaacaagcagtatttggttttctgttcttgtgttagtttgctgatggtttcctgttcatctgtgtccctgcaaaggacatgaactcatccttttttatggctgcataatattccatggtgtatatgtgccacattttctttatccagtctatcgctgatgggcactggggttggttccaagtctttgctattgtgaacagtgctgcaataaacttacatgtgcatgtgtctttagtagaatgatttataatcctttgggtatatacccagtaatgggattgctggtcaaatggtatttctggttctagatccttgaggaatctttgtcttccacaatggttgaactaatttgtactcccaccaacagtgtaaaagtattcctgtttctctacatcctcttcagcatctgttgtgtcctgacattttaatgatcactattctcactggtgtgagatgttatctcattgtggttttgatttgcatttctctaatgaccagtaatgatgagctttttttcatatgtttgttggctgcataaatgtcttcttttgagaagtgtctgttcatatccttcacccattttttgaagaaaacaaactcttaagagagaagtattcattcttttgagtgtgagggatggagaaagagaaagatggagagagtattataagcagctgtatcccctttgccatggtgatagcagaccattcacatgggagcttctggtctctttgtaataataataagagccacattaccagtacttagagtatgctagttattttaacacattgtatcattaaatcttcaaaacatccctatgagttagaaacctaaaaaaaaaaaaaaaaaaa

SEQ ID NO: 48654 - DNA, 432 bp, Homo Sapiens
gtggcccacagaacaccgaaggccaaaaagattagaaagtttagaaagggcagttatctcaacagaccgatgctcgcaaagaggccgctgttctctgcagcgaagagcctcataaattcgcaaggggttttttcatccttaggagacctgagtcctcaagaaaaccctcttctggaagtagttgctccttcagaacgttttatagaaaacactagtgtaaaagacacaactaatgtaaagacacaaaagagatgtgttcaaagacacatctctgaaaacacaaactacaatcatcctcctgaggcagtttccgctgggactgcattcaacttagaaccaactgttaaacaaactgagacaaaatgggaatacaacaatgtgggcattgacttgtcccctgagcccaaaagcttcaattacccattgctctcg

SEQ ID NO: 48655 - DNA, 1446 bp, Homo Sapiens
atggtgctgctggccgggaccgggccggagggcggcggggcgcgctgcatgaccccaccaccgccgtccccaccccggggcgcgcaggtcgaggaggaccccgctgactacgaagagtttgaggacttctcgagtctgccagacacccgcagcatcgcctcggacgactctttctaccctttcgaggacgaggaggagcacggcgtcgagagcgcggagagcgtcccggagggcgtcccggaaagcgtcccggagacggcgaccctcctgcgcgccgcctgcgccaacaacgtggggctgctgcggacgctggtgcggcgcggggtgagcgtcgaggaggcgcaggagactgaccgcaacggcaggaccggccttattgtcgcctgctaccacggctttgtggataccgtggtggccttagcagagtgcccccacgttgacgtcaactggcaggacagcgaggggaacacagccctaatcacagctgcacaggcagggcacgctatcatcactaactacttgttgaactatttccctggtcttgaccttgaaaggaggaacgcgttcgggttcaccgccctgatgaaagccgccatgcagggtcgaacggactgcatccgagccctgatgctagcaggggcggatgtccacgcgagggacccccgccgtgggatgtcgccgcaggagtgggccacttacacgggccgcgtggatgccgtccgtctcatgcagaggctgctggagcgcccctgcccggagcagttctgggagaagtaccggcccgagctgccgccgccccctgaagcggcgcggaagcccgcgggctccaagaactgcctgcagaggctcacagactgcgtgctgtccgtgctgacgccgcgctccgtgcggggcccggaggacgggggcgtcctggaccacatggtccggatgaccacgagcctctacagccccgccgtggccatcgtgtgccagaccgtgtgccctgagagccctccgagcgtggggaagaggcggctggcggtgcaggagatcctggcggcgcgggctgcacggggcccccaggcgcaggaggaggatgaggtggggggcgcggggcagcgcgggcggaccggacaggaggacgcggactcccgggagggctccccgagagccggcctccctcccgccctgggcctcctgcccctgcagcgcctgcggcggagaagcgtgcggcccggtgtggtggtgccccgggtccgagtcagcaaggcgcccgcgcccaccttccagcccgagcggccggcgcggaagggcagcaccaaggacagcggccacctgcagatccccaagtggcggtacaaggaggccaaggaggagaagaggaaggcagaggaggccgaaaagaagcgccaggccgaggcgcagaaggagaggcgcactgcgccctggaagaagaggacgtga

SEQ ID NO: 48656 - DNA, 696 bp, Homo Sapiens
atgtggggggtgggggggtggggcggggatccagaagggacagggcgggaggggggcgagcgtcccgggccgggcggggtagggagcgcggccggacgcgggctcgtcaaggcccaatggctgctgttcggaaccagaggccggggaccggagaaaggaggagcggagaaggagaaggaggagagcacggcctggctgggacagaagcggtgggaccctgggaggcctccgctgtgcccgtgccgcgctcctcgggaccagcgcgtcgcacacaaaggggctgccgagccagagccaccagcggcctcagggcaccgtggggagcgcgcagctagggggcgctgtggcgcaccccgccccgcagccccgcccccggccctccccggccccaccccactcccaccgccctctccgcggccgtccccacccctatctccgcgacccccactcctcctcggctgttccccaaccctgtcactgtgctcccctccctactcccggcccgtagtggaggtgactttcctgcgcagcgccgcttctgagggcggagaacccacagggagtgcgacccctttgcacgctgtgagtgggcaactgtccgagggactcgagccgatcgaaggctggacgccctatagggctcttggcagtccacgaaagacctggagtccgcctccccatttctccggtcggtga

SEQ ID NO: 48657 - DNA, 929 bp, Homo Sapiens
gaaaatacggaatggagcgacagggagtggacgtgccccatgtgaaatgcaaagaccaggaaccgcagcccttgggggagagcaaggagcatccgcggtgggaagagaactgcgaggaggaagctggtggagggccagctagtgccagttgccagctgacggtcctggaagggaagtcgggactctacttctcctctctggactcaagcattgacatcctgcagaagagagcccaggagctgatcgaaaacatcaacaagagccggcaaaaggaccatgcactcatgaccaacttcaggaacagcctgaagaccaaggtttcggatctgacagagaaattagaggagaggatctatcagatttataatgaccacaacaagatcatccaggaaaagctccaagagttcacccagaaaatggcaaagatcagccatttggagacagagctcaaacaagtctgccacagcgtggagactgtgtacaaagacctgtgtctccagcctgagcagagcctaagactcagatgggggccagaccactctaggggaaagtccccaccacgtcccggcaactcacagcccccagacgtgttcgtttcttctgtggctgaaactacttctcaggccactgcttcagaagtacagaccaacagagatggtgaatgctgacagctgccgggagactcacgccttagtgacagtctccaggagaagactgtgaggccaccatttgggccacactgagaaattgtttttcatggttctataatgcatcttggcagaaaaaaacaaaaacccaaagctccttgtgctgaactcccaaaatgtagcaagtccagcccctgccataggcccaggcttcgtgctccccacccttggcaagttctccccacccccagccccacagtttattaaatgtttgattttcaa

SEQ ID NO: 48658 - DNA, 2112 bp, Homo Sapiens
atggacgcggcactgctccacagcctgctggaggccaactgcagcctggcgctggctgaagagctgctcttggacggctgggggccacccctggaccccgagggtccctactcctactgcaacacgaccttggaccagatcggaacgtgctggccccgcagcgctgccggagccctcgtggagaggccgtgccccgagtacttcaacggcgtcaagtacaacacgacccggaatgcctatcgagaatgcttggagaatgggacgtgggcctcaaagatcaactactcacagtgtgagcccattttggatgacaagcagaggaagtatgacctgcactaccgcatcgcccttgtcgtcaactacctgggccactgcgtatctgtggcagccctggtggccgccttcctgcttttcctggccctgcggagcattcgctgtctgcggaatgtgattcactggaacctcatcaccacctttatcctgcgaaatgtcatgtggttcctgctgcagctcgttgaccatgaagtgcacgagagcaatgaggtctggtgccgctgcatcaccaccatcttcaactacttcgtggtgaccaacttcttctggatgtttgtggaaggctgctacctgcacacggccattgtcatgacctactccactgagcgcctgcgcaagtgcctcttcctcttcatcggatggtgcatccccttccccatcatcgtcgcctgggccatcggcaagctctactatgagaatgaacagtgctggtttggcaaggagcctggcgacctggtggactacatctaccaaggccccatcattctcgtgctcctgatcaatttcgtatttctgttcaacatcgtcaggatcctaatgacaaagttacgcgcgtccaccacatccgagacaatccagtacaggaaggcagtgaaggccaccctggtgctcctgcccctcctgggcatcacctacatgctcttcttcgtcaatcccggggaggacgacctgtcacagatcatgttcatctatttcaactccttcctgcagtcgttccagggtttcttcgtgtctgtcttctactgcttcttcaatggagaggtgcgctcagccgtgaggaagaggtggcaccgctggcaggaccatcactcccttcgagtccccatggcccgggccatgtccatccctacatcacccacacggatcagcttccacagcatcaagcagacggccgctgtgtgacccctcggtcgcccacctgcacagctcccctgtcctcctccaccttcttcctctgggttctctgtgctgggcaggctctcgtggggcaggagatgggaggggagagaccagctctccagcctggcaggaaagagggggtgcggcagccaagggggactgcaagggacagggatgagtgggggccaccaggctcagcgcaagaggaagcagagggaattcacaggaccccctgagaagagccagtcagatgtctgcaggcatttgcccatcccagcctctctggccagggccttactgggcccagagcagagaaggacctgtccaacacacacagctatttatagtagcagacacagggctcccctgccctactcatggagccagcagccaggcaatggtgtggccctgcactggcccttggcctccacactcagtggtgcccctgcagttgggtggggtacgccagcaaaggatcagtttggctgccttatcccaggggctgtcacctagagaggctcacttgtaccccacccttgttcctgtgtcccctccccagccatcctcccgccttgggggctccatgaaggatgcaggcttccaggcctggcttcctctcttgggagaccccttctctgcctagtccacagattaggcaatcaaggaagacgccatcagggaagccacatccttagtcaaccagttgcatcgtgcggggcaaaatgaggagcagaggcatggaggagggaggcgtgggatgggaatagcagaaaccaaccatgtcttcagtgattgaaactcataccccattgccctttgccctccagtctccccttcagaaacatctctgctctctgtgaaataaaccatgcctcttgg

SEQ ID NO: 48659 - DNA, 884 bp, Homo Sapiens
agcctacgcacgaaagtgactaggaggaaggatattataaagtgatgcaaacagaaattccaccagcctccatgtatcatcatgtgtcataactcagtcaagctcagtgagcattctcagcacattgcctcaacagcttcaaggtgagccagctcaagactttgctctccaccaggcagaagatgacagactgtgaatttggatatatttacaggctggctcaggactatctgcagtgcgtcctacagataccacaacctggatcaggtccaagcaaaacgtccagagtgctacaaaatgttgcgttctcagtccaaaaagaagtggaaaagaatctgaagtcatgcttggacaatgttaatgttgtgtccgtagacactgccagaacactattcaaccaagtgatggaaaaggagtttgaagacggcatcattaactggggaagaattgtaaccatatttgcatttgaaggtattctcatcaagaaacttctacgacagcaaattgccccggatgtggatacctataaggagatttcatattttgttgcggagttcataatgaataacacaggagaatggataaggcaaaacggaggctgggaaaatggctttgtaaagaagtttgaacctaaatctggctggatgacttttctagaagttacaggaaagatctgtgaaatgctatctctcctgaagcaatactgttgaccagaaaggacactccatattgtgaaaccggcctaatttttctgactgatatggaaacgattgccaacacatacttctacttttaaataaacaactttgatgatgtaacttgaccttccagagttatggaaattttgtccccatgtaatgaataaattgtatgtatttttctct

SEQ ID NO: 48660 - DNA, 335 bp, Homo Sapiens
ggagagaagctaacggtgctcatcgtgtggcacgcaggtgcgttgttttctctccactaaggctgctgggtggggccaaaatagtccaggcagccaagtgcagaggcgttgggggcggcaaagatgcaaaggatccccactgtggctgcaccccgaggaggagtccgtggcaggaggcccacacccaggacccggcgccaacagtgaggagacgaacctggaagacatcccgctgtccagacaccgcgagggaggcgagtggtgctcgcagcctgggacttaggaacacagggaaacagcttccacatcatttgctgaataaatatttcttgcag

SEQ ID NO: 48661 - DNA, 3625 bp, Homo Sapiens
atggctaaactattacaacctccacccaagttcctgccctcagagtggcacattgctaacaagaaccagtaccacagagcagacgctcaaaggtcccgatcagaacgcctggtcgcagaaagccagaggcttgtggatgaaattgaaaagaccacaagaaaatctcaaagcgatgtgaacaagaaactagaacagagactcgaggaagtccagttctggaagaaggagttagatgacaaacttgagcagcttgtgaatgtaactgatgatctactcatatataagatcagattggaaaaagccctggagaccttgaaagagcccttgcacatcactgagacatgcctggcatacagggagaagcgcattggcattgacctggtgcacgacacagtggagcatgagctgataaaggaggctgagatcatccagggcattatggctctgctgacccgtaccttggaggaggcttccgagcagattcggatgaaccgctctgccaagtacaatcttgagaaggatttgaaggacaagtttgtggccctgaccatagatgatatctgcttctcgctcaacaacaactcaccaaacatcagatattctgagaacgccgtgaggattgagccaaactccgtgagtctggaagactggttggacttctccagcaccaatgtggagaaggctgacaagcagcggaacaactccctgatgctgaaagccctggtggatcgaatcctgtcccagacagccaatgatctgcgcaagcagtgtgatgtggtggacacggcattcaagaatgggctgaaggatacaaaggatgccagggacaagctggctgatcatctggccaaggtcatggaagagattgcttcccaggagaaaaatattacagctcttgaaaaggccatccttgaccaagaagggccagccaaggtggctcatacgcgcttggagaccaggacacaccggccgaacgtggagctgtgtcgtgatgtcgcacaatataggctaatgaaggaggttcaagagatcacccacaatgtcgcaagattgaaggaaactttagcccaagctcaggcagagctgaaagggctgcatcgcagacagcttgccctgcaggaggagatccaggtcaaagagaacaccatttatatcgacgaagtgctgtgtatgcagatgaggaaatccatcccacttcgggatggggaagaccatggggtctgggctgggggcctccgccctgatgctgtctgctaatagtagggctagttccaattctcattaaaccacattgtaaacagtagttacagtagtacagagctctcatttcaggctggcggggcctctagccagcctgctgcaacctcttggctggcattccaagcctgctcagggggctgattttggggcgagtttcttctcttatgctggtgtggtgtttgcctaacaattcaactccatattttagcacaggccactcttacaatatcacaggacttggggccccaggacagggtttcaagacatttcagttcagattcaattcaataaagtagttgggctggatcacctgtgtagaccatgcccctcttgctcatgagatgggatgctaacctttctcttggctctcaaaatttcttttctctagaaaataatgtgttttttttctcttaaatactcaaataacataaagaaaaagaacaaaattccattcattcaagtcaatgggttcaagtcaatggttaagactgtaggttccggagtctgccatctgagtataggacctccaatagtccccactcacagggctataggggcgttgaatgagatcacctccgtaaagggcttcatactgagcctgtatcatggggcagtgagtgtttaatgaatgtgagccattgtgagcagtcccaccctataccaacataatttctgcacaattgtactcatggcataaactcaatttcaggattatttttttccttcactgctaattattgcaagcctttgttcatgttgctaaattgtctttataattattttaatggttacgtacctctttacaagttttcagcaagactgttttatatacttactgtttcttttccaaaaagagttcaacttgtgggaggctgccttccgctgagctgcagcaggtcagagatctatgtgggtgactgtcaaaggaagacatttgctgtgggaaactgctcatttgttccttattccgctaacattgaaggaacactttccatggacgaggcttaccatctcagcaccctcccatgtgtgaagctgctgctacactctgctaacatttggttccccggtgctcatggacagctgacggtgtggggctcaggagacctagcttctagttgcaacactgccaggaaagtttctctccttctttaggaccacctgtaaagtaaggaaaggactatatcgtctggaactcttcctgtccttgctgttccctgaatctggctgtctagctgcacatacggtgtcatagggcacaatgataatgcagagtgtgggcctaattcctgggagctttgcaatctaggtgctccttggtccagagactctttgccatcagaaagggatgttcccaatctgggatggagaaaccccctttgaggccaaaagcactggcttaattctgttaattctgatctatgccaccccagtgctgaacgtctcctctcagagtgctcagcaaatacacagcccttcccatgcctcaatcaaggagggaggcccctctctgctcactgggaagcctctgggtgcttttctgctctggctcggaagagtccaaataagccttcccagctcactgggcagacctcagagtttctgctaacttagcagggttttgaggtctgtcccagaggatgtggctggcagggtgtgaagacactgggcaaaatccttccttgtgaatacagctctcagaggcagccagcctcagtggtggattcagatcccaggctctgcagggagatgtgattcagatcagctggtggatcagctccacgctctacctgtgatgtgatccccgccaagttactcaacttccccgagcttcagttgcctaatctgtaaataagactaataaagcctagattggcgagataacgtgtggaagactctcaacacagtgtctggaacatgctgcttttaagggaaatgtgattttgattatggttgaggccatttctcaacatgtagacataaaatgcggaaacatctaagatttcaataaagcaatgttttgttagtaaatctgctcatgcaattcctaggtcttattgggtatcaatgtgtttcacaaatgaaatctggtcttagcctgtgtttcatgaaggacatttgcaattagcccacggttgcaaaagcctttgtagctactgatgaaggccaccctgttccgtacccctctgacccatccaagccagatatctttttaagacaaagtacaatttttgtcttagataacacaaaatttatttttaaataccatcacttaaattgggagtcatttaaacttgaattttcttaacatagaaccaaagttgaacgtgtctgtaatccacataattaaaagaaacacaggagc

SEQ ID NO: 48662 - DNA, 266 bp, Homo Sapiens
actcccagtcggggcctcgcaccaccttcgctccctggaagatgccccttagtgggatcctcgggaggccctggcggggactcagtgtgacactgcaagaggtgagcggtctcgtagcggtcgaaggcgtgggcgagctcatgcttgttgtgcatgtagcactgcgtgcagaggtcgtagtccaggcacacacggcacttccagcgcatcccccgcagcccgtgcttcttgcagcagtcacagatgatgttggggtgccggacgcc

SEQ ID NO: 48663 - DNA, 3852 bp, Homo Sapiens
acgcgctcacacacagagagaaaatccttctgcctgttgatttatggaaacaattatgattctgctggagaacttttcagctgagaaatagtttgtagctacagtagaaaggctcaagttgcaccaggcagacaacagacatggaattcttatatatccagctgttagcaacaaaacaaaagtcaaatagcaaacagcgtcacagcaactgaacttactacgaactgtttttatgaggatttatcaacagagttatttaaggaggaatcctgtgttgttatcaggaactaaaaggataaggctaacaatttggaaagagcaactactctttcttaaatcaatctacaattcacagataggaagaggtcaatgacctaggagtaacaatcaactcaagattcattttcattatgttattcatgaacacccggagcactacactataatgcacaaatggatactgacatggatcctgccaactttgctctacagatcatgctttcacattatctgtctagtgggtactatatctttagcttgcaatgacatgactccagagcaaatggctacaaatgtgaactgttccagccctgagcgacacacaagaagttatgattacatggaaggaggggatataagagtgagaagactcttctgtcgaacacagtggtacctgaggatcgataaaagaggcaaagtaaaagggacccaagagatgaagaataattacaatatcatggaaatcaggacagtggcagttggaattgtggcaatcaaaggggtggaaagtgaattctatcttgcaatgaacaaggaaggaaaactctatgcaaagaaagaatgcaatgaagattgtaacttcaaagaactaattctggaaaaccattacaacacatatgcatcagctaaatggacacacaacggaggggaaatgtttgttgccttaaatcaaaaggggattcctgtaagaggaaaaaaaacgaagaaagaacaaaaaacagcccactttcttcctatggcaataacttaattgcatatggtatataaagaaccagttccagcagggagatttctttaagtggactgttttctttcttctcaaaattttctttccttttattttttagtaatcaagaaaggctggaaaactactgaaaaactgatcaagctggacttgtgcatttatgtttgttttaagacactgcattaaagaaagatttgaaaagtatacacaaaaatcagatttagtaactaaaggttgtaaaaaattgtaaaactggttgtacaatcatgatgttagtaacagtaatttttttcttaaattaatttacccttaagagtatgttagatttgattatctgataatgattatttaaatattcctatctgcttataaaatggctgctataataataataatacagatgttgttatataaggtatatcagacctacaggcttctggcaggatttgtcagataatcaagccacactaactatggaaaatgagcagcattttaaatgctttctagtgaaaaattataatctacttaaactctaatcagaaaaaaaattctcaaaaaaactattatgaaagtcaataaaatagataatttaacaaaagtacaggattagaacatgcttatacctataaataagaacaaaatttctaatgctgctcaagtggaaagggtattgctaaaaggatgtttccaaaaatcttgtatataagatagcaacagtgattgatgataatactgtacttcatcttacttgccacaaaataacattttataaatcctcaaagtaaaattgagaaatctttaagtttttttcaagtaacataatctatctttgtataattcatatttgggaatatggcttttaataatgttcttcccacaaataatcatgcttttttcctatggttacagcattaaactctattttaagttgtttttgaactttattgttttgttatttaagtttatgttatttataaaaaaaaaaccttaataagctgtatctgtttcatatgcttttaattttaaaggaataacaaaactgtctggctcaacggcaagtttccctcccttttctgactgacactaagtctagcacacagcacttgggccagcaaatcctggaaggcagacaaaaataagagcctgaagcaatgcttacaatagatgtctcacacagaacaatacaaatatgtaaaaaatctttcaccacatattcttgccaattaattggatcatataagtaaaatcattacaaatataagtatttacaggattttaaagttagaatatatttgaatgcatgggtagaaaatatcatattttaaaactatgtatatttaaatttagtaattttctaatctctagaaatctctgctgttcaaaaggtggcagcactgaaagttgttttcctgttagatggcaagagcacaatgcccaaaatagaagatgcagttaagaataaggggccctgaatgtcatgaaggcttgaggtcagcctacagataacaggattattacaaggatgaatttccacttcaaaagtctttcattggcagatcttggtagcactttatatgttcaccaatgggaggtcaatatttatctaatttaaaaggtatgctaaccactgtggttttaatttcaaaatatttgtcattcaagtccctttacataaatagtatttggtaatacatttatagatgagagttatatgaaaaggctaggtcaacaaaaacaatagattcatttaattttcctgtggttgacctatacgaccaggatgtagaaaactagaaagaactgcccttcctcagatatactcttgggagagagcatgaatggtattctgaactatcacctgattcaaggactttgctagctaggttttgaggtcaggcttcagtaactgtagtcttgtgagcatattgagggcagaggaggacttagtttttcatatgtgtttccttagtgcctagcagactatctgttcataatcagttttcagtgtgaattcactgaatgtttatagacaaaagaaaatacacactaaaactaatcttcattttaaaagggtaaaacatgactatacagaaatttaaatagaaatagtgtatatacatataaaatacaagctatgttaggaccaaatgctctttgtctatggagttatacttccatcaaattacatagcaatgctgaattaggcaaaaccaacatttagtggtaaatccattcctggtagtataagtcacctaaaaaagacttctagaaatatgtactttaattatttgtttttctcctatttttaaatttattatgcaaattttagaaaataaaatttgctctagttacacacctttagaattctagaatattaaaactgtaaggggcctccatccctcttactcatttgtagtctaggaaattgagattttgatacacctaaggtcacgcagctgggtagatatacagctgtcacaagagtctagatcagttagcacatgctttctactcttcgattattagtattattagctaatggtctttggcatgtttttgttttttatttctgttgagatatagcctttacatttgtacacaaatgtgactatgtcttggcaatgcacttcatacacaatgactaatctatactgtgatgatttgactcaaaaggagaaaagaaattatgtagttttcaattctgattcctattcaccttttgtttatgaatggaaagctttgtgcaaaatatacatataagcagagtaagccttttaaaaatgttctttgaaagataaaattaaatacatgagtttctaacaattaga

SEQ ID NO: 48664 - DNA, 2412 bp, Homo Sapiens
atgacaaaccaggaaaaatgggcccacctcagcccttcggaattttcccaacttcagaaatatgctgagtattctacaaagaaattaaaggatgttcttgaagaattccatggtaatggtgtgcttgcaaagtataatcctgaaggggtaaaacttctttttctttatatcaattttgaaggtttcaaactattcatgaagacattcctggaagccgagcttcctgatgatttcactgcacaccttttcatgtcatttagcaacaagtttcctcattctagtccaatggtaaaaagtaagcctgctctcctatcaggcggtctgagaatgaataaaggtgccatcacccctccccggactacttctcctgcaaatacgtgttccccagaagtaatccatctgaaggacattgtctgttacctgtctctgcttgaaagaggaagacctgaggataagcttgagtttatgtttcgcctttatgacacggatgggaatggcttcctggacagctcggagctagaaaatatcatcagtcagatgatgcatgttgcagaataccttgagtgggatgtcactgaacttaatccaatcctccatgaaatgatggaagaaattgactatgatcatgatggaaccgtgtctctggaggaatggattcaaggaggaatgacaacgattccacttcttgtgctcctgggcttagaaaataacgtgaaggatgatggacagcacgtgtggcgactgaagcactttaacaaacctgcctattgcaacctttgcctgaacatgctgattggcgtggggaagcagggcctctgctgttccttctgcaagtacacagtccatgagcgctgtgtggctcgagcacctccctcttgcatcaagacctatgtgaagtccaaaaggaacactgatgtcatgcaccattactgggttgaaggtaactgcccaaccaagtgtgataagtgccacaaaactgttaaatgttaccagggcctgacaggactgcattgtgtttggtgtcagatcacactgcataataaatgtgcttctcatctaaaacctgaatgtgactgtggacctttgaaggaccatattttaccacccacaacaatctgtccagtggtactgcagactctgcccacttcaggagtttcagttcctgaggaaagacaatcaacagtgaaaaaggaaaagagtggttcccagcagccaaacaaagtgattgacaagaataaaatgcaaagagccaactctgttactgtagatggacaaggcctgcaggtcactcctgtgcctggtactcacccacttttagtttttgtgaaccccaaaagtggtggaaaacaaggagaacgaatttacagaaaattccagtatctattaaatcctcgtcaggtttacagtctttctggaaatggaccaatgccagggttaaactttttccgtgatgttcctgacttcagagtgttagcctgtggtggagatggaaccgtgggctgggttttggattgcatagaaaaggccaatgtaggcaagcatcctccagttgcgattctgcctcttgggactggcaatgatctagcaagatgcctgcgatggggaggaggttacgaaggtgagaatctgatgaaaattctaaaagacattgaaaacagcacagaaatcatgttggacaggtggaagtttgaagtcatacctaatgacaaagatgagaaaggagacccagtgccttacagtatcatcaataattacttttccattggcgtggatgcctccattgcacacagattccacatcatgagagaaaaacacccagagaaattcaacagtagaatgaagaacaaattttggtattttgagtttggcacatctgaaactttctcagccacctgcaagaagctacatgaatctgtagaaatagaatgtgatggagtacagatagatttaataaacatctctctggaaggaattgctattttgaatataccaagcatgcatggaggatccaatctttggggagagtctaagaaaagacgaagccatcgacgaatagagaaaaaagggtctgacaaaaggaccaccgtcacagatgccaaagagttgaagtttgcaagtcaagatctcagtgaccagctgctggaggtggtcggcttggaaggagccatggagatggggcaaatatacacaggcctgaaaagtgctggccggcggctggctcagtgctcctgcgtggtcatcaggacgagcaagtctctgccaatgcaaattgatggggagccatggatgcagaccccatgcacaataaaaattacacacaagaaccaagccccaatgctgatgggcccgcctccaaaaaccggtttattctgctccctcgtcaaaaggacaagaaaccgaagcaaggaataa

SEQ ID NO: 48665 - DNA, 1551 bp, Homo Sapiens
ttcatgctaaaaactctcagtaaactaggtattgatagaacatatctcaaaataacagctatttgtgacaaacctacagccaatatcatactgaatgggcaaaaactggaagcattccctttgaaaaccggcacaagacaaggatgccctctctcaccactcctattcaacgtagtgttggaagttctggccagggcaatcaggcaggagaaaaagggtattcaaataggaagagaggaagtcaaattgtctctgtttgcagatgacatgattgtatatttaaaaaaccccatcgtctcagccaaatctctgaaaagcaacttcagcaaagtctcaggatacaaaatcaatgtgcaaaaatcacaagcattcctatacaccaataatagacaaacacaagtcatgagtgaactcccattcacaattgctacaaaaataataaaatacctaggaatccaacttacaagggatgtgaaggacctcttcaaggagaactgcaaaccactgctcaagggaaaggacacaaacagatggaaaaacattccatgctcatggataagaagaatcaatattgtgaaaatggccatactgcccaaggtaatttatagattcaatgctatcccaatcaagctaccaatgacttgcttcacagaattagaaaaaaacttaaatttcatatggaacaaacaaagagcccatatagccaagacaatcctaagcagaaagaacaaagctggaggcatcacactgcctgacttcaaactatactacaaggctacagtaaccaaaacagcatggtactggtaccaaaacagttatatagacaacagaacagaggactcagaaataacgccacacatctacaaccatctgatctttgccaaacctgacaaaaacaagaaatggggaaaggattccctatttaataaatggtgttgggaaaactggctagccatatgcagaaaactgaaactggaccccttccttacaccttatacaaaaattaactcaagatggattcaagacttaaacataagacctaaaaccataaaaaccctagaagaaaacataggcagtaccattcaggacataggcatcggcaaagacttcatgactaaaacaccaaaagcaatggcaacagaagccaaaattggcaaatgggatctaattaaaagcttctttacagcaaaagaaactatcatcagagtgaacaggcaacctctacaggagaaaacttttgcaatctatccatctgacaaagggctaatatccagaatcaaggaacttaaacaaatttacaagaaaaacaaccccaccaaaaagtgggtaaaagatataaacagacacttctccaaagaagacctttatgtggccaaaaaacatgaaaaaaagccatcactggtcgttagagaaatgcaaatcaaaaccacaatgagataccatctcacaccagttagaatggcgatcattaaaaagtcaggaaacaacagatgctggagaggatgtgcagaaatacgaatgcttttacacagttggtgggagtgtaaatta

SEQ ID NO: 48666 - DNA, 876 bp, Homo Sapiens
atgagatacggatctgtttgcagtggagctgcggcgatgcccatagaagaaccggcgctgcgcagctggcagcgcccgttccttaaatgggctggcggcaaatattcgctgctgccggaactggatcgtttgatccccgcaggtaaacgccttattgagccttttgtgggtggcggctcggtgttccttaactcagacaagcacgaacgcttccttctggctgacgtcagcgctgacctgattaacctgtatcagatgctggcggtggtccccgattcggtgatctatgaggcaatgaaggcattcaggcatcttaatgatgccgaaaactatacgttaattcgtgaagcattcaacgcgcagcggctggatgcggtcgagcgtgcagcagcattcctttacctcaatcggcactgcttcaacggcctgattcgttacaacctggacttttttaacgtcggctttgggaaatataaagcgccatatttcccggaagaagagatcaaggcatttaagcggaaggctcacgcatgcgtattcatgaatgcaggcttcaggcgcacgctcgcgctggcaggtgatggtgacgtcgtttactgcgatccgccttatgagccgcttcccggcaccgctggtttcactaactacgcggctggtgggttctcatgggatagccaggtagagcttgcggaaagctgtgtggcagcccaccagcggggggcaaaagtggtgatcagcaattctaccgcaccgcgcgtaattgaactttacgaacagcacggcttcaatctgcaccgcgtcagtgctcgccgggctatatccagcaaaggcagtacccgcgaaacagcgagtgatgtcgtagccactttgggagtg

SEQ ID NO: 48667 - DNA, 252 bp, Homo Sapiens
gccacgagactcagcaccttcctcaagatttcctgggccaaggagccagtgctggtcttgtcctctgtcatccggagcctcactgtaattctacccccacttagtccccacaccaagtactccatcatgatcaacgaggcaaggccctacaactacccagtgcctgtctgcaatgatgggaacatgcccgatgtgcccagccacccccaggacccccaaggccccagtttggagtggctgaagaaattgtga

SEQ ID NO: 48668 - DNA, 1232 bp, Homo Sapiens
agtgttcggctggggcaggcacgctgtggctggctacttcccttcctcccatcccccttgggccaaacgggatcggtgcttctggaaacaatgaccgataaaacagagaaggtggctgtagatcctgaaactgtgtttaaacgtcccagggaatgtgacagtccttcgtatcagaaaaggcagaggatggccctgttggcaaggaaacaaggagcaggagacagccttattgcaggctctgccatgtccaaagaaaagaagcttatgacaggacatgctattccacccagccaattggattctcagattgatgacttcactggtttcagcaaagataggatgatgcagaaacctggtagcaatgcacctgtgggaggaaacgttaccagcagtttctctggagatgacctagaatgcagagaaacagcctcctctcccaaaagccaacgagaaattaatgctgatataaaacgtaaattagtgaaggaactccgatgcgttggacaaaaatatgaaaaaatcttcgaaatgcttgaaggagtgcaaggacctactgcagtcaggaagcgattttttgaatccatcatcaaggaagcagcaagatgtatgagacgagactttgttaagcaccttaagaagaaactgaaacgtatgatttgagaatacttgtccctggaggattatcacaccccaaatgcataatctcgttaatgattgaggagagaaaaggatcagattgctgttttctacaatggagcaggatattgctgaagtctcctggcatatgttaccgaatcaaatagccttccagaggctaagaaatttctgttagtaaaagatgttctttttcccaaagcattttatttgaaaggataacttgtgttttggttattttgtattcccacctgtgctggtagatattattaacccattaggtaaatactattacagtcgtggtttctgcagcagctcacagtgttgtagctggtatttatcactacgttctttcgctacccatttcacattccctttgccctgagatagcatgtcagttggtcatgatgcttggcctggcaggatgactcaaaccttcattacggaagagtctgaaccattagatgtcctgcctggatggggttgctgtgatcttccattaactctaatcgaaaaacacgggaggactaagaagctctctagacatatcacacatactcttccttagcccctggtgt

SEQ ID NO: 48669 - DNA, 543 bp, Homo Sapiens
ggaacagaatctgacagtgatgaatcagtaccagagtttgaggaacaggattccacacagacaaccacacaacaagcccagctggcagcagcagctgaaattaataaagaaccagtcagcaaagcaaaacagagtcagagtgaaaagaaagcacagaaggctatgtccaaactgggtcttcaacaggttacaggggttactagagtcactatctggaaatctaagaatatcctctttgtcatcacaaaagcagatgtctacaagcgccctgctttggatacctacatagttttggggggaaccaaaaatgaagatttatctcagcaagcacagctagcagctgctgagaaattcaaagttcaagaaacaacacagaccccaactgtacaagaggagagtgaagaggaagaagttgataaaacaggtgtggaagttaagggcatggaactggtcatgtcacaagcaaatatgtcaagagcaaaggcagtccaagccctgaagaacaacagtaattatgttgtaaatgctattatggaattaaca

SEQ ID NO: 48670 - DNA, 3347 bp, Homo Sapiens
tgcccaagacgggtctggagcctgacttccgggtgtccatgaccctggcggctgcttccggtccgccatgaaagggctatcaggcagccgcagccatcaccacggggtcacctgcgactcggcctgtgactcgctgtcgcaccactccgaccgcaagccctacctgctgagcccagtggagcaccaccccgcagaccacccatactacacccagcggaactccttccaggctgagtgcgtgggccccttcagcgacccgctggccagcagcaccttcccccgcaggcactacacctcgcagcaagagctgaaggacgagtgtgccctggtgccccgcaccctggccaccaaggcgaaccgcatccccgccaacctgctggaccagttcgagcggcagctgccactcagccgcgatggctatcacaccctgcagtacaagcgcacggccgtggagcaccgcagcgacagccccggccgcatccgccacctggtgcactcggtccagaagctcttcaccaagtcgcactccctggaggggccgtccaagggcagcgtcaacgggggcaaggccagccctgacgaggcgcaggcggcgcgctatggcaaacgcagcaagagcaaggagcggcgcgcggagcccaaggcccggcccagcacctccccgggctggtggagctcggacgacaacctggatggtgacatgtgcatctaccacgccccctcgggcgtgatgaccatgggcaggtgccccgaccgctcggcctcacagtacttcctggaggcctacaacaccatcagcgagcaggcggtgaaggcctcccggagcaacaacgacgtcaagtgctccacctgcgccaacctgccggtcagcctggacaccccgctgctgaagaagagcgcctggtcctccacgctcaccgtgagccgggcccgggaggtttaccagaaggcctcggtgaacatggaccaggccatggtgaagtccgagtcgtgtcagcaagaacgctcctgccagtacctgcaggttccacaagatgaatggacagggtacaccccacgaggtaaagatgatgaaattccatgccgaagaatgcggagtggcagttatatcaaggccatgggggatgaagacagtggagactcagacacgagtcctaagccttctccaaaagttgctgcgcggagagaaagctatctcaaggctactcagccatcccttacagaactcaccacactcaaaatctccaatgaacactcacccaaactccagatccggagtcatagttacctgagggcagtgagtgaagtctccatcaaccggagcctggacagcctggaccctgcaggcttgctcacatcaccaaagttccgctccaggaatgagagctacatgcgagccatgagcaccatcagccaggtgagcgagatggaagtgaacgggcagttcgagtccgtgtgcgagtccgtgttcagcgagctggagtcgcaggccgtggaagcgctggacctgcccatgcccggctgcttccgcatgcggagccacagctatgtgcgggccattgagaaaggctgctcccaggacgacgagtgcgtgtccctgaggtcgtcctcgccgccgcgcaccaccaccaccgttaggaccatccagagcagcacggtgtcatcttgcattacaacatataagaagacaccacctccagtcccacccagaactaccacgaaacctttcatttctatcacagcccagagtagcacagagtcagcccaggatgcctacatggacggacagggccagcgaggagatattatcagccagtctggactcagcaactccaccgagagcctggacagtatgaaggctctgacagccgccatcgaagctgcaaacgcccagatccatggccctgccagtcaacacatgggcaataacactgccaccgtcaccaccacgactaccatagccaccgtcaccacggaggacaggaagaaggaccactttaagaaaaatcgatgcctgtctatcgggatacaggtggatgatgctgaagaacctgacaaaacaggggagaataaagcacccagtaagttccagtccgtgggagtgcaagtagaagaagagaagtgcttccgcaggttcactcgatccaacagtgtgacgacagcagtacaggccgacctggacttccatgataatctggaaaattctctggaatctatagaggacaattcgtgtcctggccccatggccagacagttctcccgcgatgccagcacctccacagtcagcattcagggctcaggaaaccattaccatgcctgtgccgccgatgatgactttgacacggattttgacccctctattctgcctcctccggacccctggattgactctatcactgaagaccctctggaggccgtgcaaaggtcagtgtgccaccgggatggccactggttcctgaagcttctccaggcagagcgagaccgcatggaggggtggtgtcaacagatggagcgggaagaacgggaaaacaacctgcccgaagacattctaggaaaaatccgaaccgcagtgggcagtgcccaacttctcatggcccagaaattctaccagttcagagaactgtgtgaagaaaacctgaatcctaatgctcatccaagacccacctcccaggatttggcggggttttgggacatgctgcagttgtccatagaaaatattagtatgaaatttgatgaacttcatcagttaaaggccaataattggaaacagatggatcctcttgacaagaaggagagaagggcccctcctccagtgccaaagaagccggcgaagggccccgcgccgctgatccgggagcgctcgctggagagctcgcagcgccaggaggcccgcaagcgcctgatggccgccaagcgcgccgcgtccgtccgccagaactcggccaccgagagcgccgagagcatcgagatctacatccccgaggcgcagacccggctctgagcgccccgcagcccggccgccgccgccaagcatctgtcccctcctcccccggccgctcctctgccggctgcctctccccctccgagcccgtccgctcccgagctcggtgacttccactgtcgcggtgtagttgtccacctcgcaggagccgccccccgggcccccctcagccccccacttcccgtacccgtttgcccatctccttcttcaccgagcttcgccccctgtcctgatgccgtcgccctgcctcatactgagatccaaccctttattttctgggcaaagccaaacccacctgtgtagaagtgatgcctttaggtcacccgccgtcctcagttctctcgag

SEQ ID NO: 48671 - DNA, 747 bp, Homo Sapiens
gaattcgtcttcaccaaagaatcaaccagccgcatcggcgtggctaatctctatcgcctgatgcgcgggtatgcctcgggtggtctggtcggcggcgggaacgcagccggtgctggcatgggcgggattagtgtttatgccccagtcagcatcagccagcaggggagtgacggaagcataaatcaggcgcacggggacggcgaaacagctgcaggcgattgttcagcagacaatcaccgagcgactgaaaaaagaaatgtccgcgggtgctttattcgaggaggacacagtgacggacacgtttacctggcgcacgaaaaacagcgcagggcactgaaacagcccgaacgctgcaggcccggggatggctacaaacagatagcggggatggggatcaacgacaaacaggaaacgtggaacctggactggacgggcaccagacaggaggcggctgcgctgcgcgctttcctgatgtctcacgttactaaatcgttctggtggaccactccatggggtgaaaaaaagctgttcagaatgaaggccgattcgttcagcgtttctttcccgggaaaaaagccactgtggccttcacttttgaacgttcgcgccctgattttctcgaaaaacactgaaagctgcctccgggcggcttttttttatggggggagtatgagttttgcgacagacatacaacagctgagccccggcagcgttattcagctgattgagatcgacggcactgaattc

SEQ ID NO: 48672 - DNA, 3216 bp, Homo Sapiens
atgtcaaatgcaaaagaaagaaaacacgccaagaaaatgagaaaccagcctaccaatgtgactctgtcctctggctttgtggctgacagaggtgtaaagcaccacagtggaggtgaaaaacctttccaagctcaaaaacaagagcctcatcctggaacttcacgacagcggcaaaccagagtcaacccccattctctgcctgaccctgaagtgaatgagcagtcttcctccaaagggatgtttagaaaaaagggaggatggaaagcaggtcccgagggcacgtctcaggagatccccaagtatataactgcttctacttttgctcaagcacgagctgctgaaatcagtgctatgttaaaagctgtgacccagaagtcttcgaattcactggtttttcagactctgccacggcacatgcgacgaagagccatgagccacaacgtcaaacgccttcccagacggttacaggagattgcccagaaagaggcggagaaagccgtacatcagaaaaaagaacattcaaaaaataaatgccataaagctcgaagatgtcacatgaaccggacgctagaatttaaccgtagacaaaagaagaacatttggttagaaactcacatctggcacgccaagcggtttcatatggtcaagaagtggggctactgccttggggagaggccaacagtcaagagccacagagcctgctatcgagccatgacgaaccggtgcctcctgcaggatttatcctattactgttgtttggagttgaaaggcaaagaggaagaaatactaaaggcgctttctggaatgtgtaacatagacacagggctgacgtttgcagcagttcactgcttgtctggaaagcgccaagggagccttgtgctttatcgggtgaataaatatcccagagaaatgcttgggcctgttacgtttatctggaagtcccagaggaccccgggtgacccttctgagagcaggcagctgtggatctggctgcatccaacccttaaacaggatatcttagaggaaataaaagcagcgtgccagtgtgtggaacccatcaaatcagctgtctgcatcgctgacccacttccaacaccatcccaagaaaaaagccaaactgaattgcctgacgagaaaattggcaagaaaagaaaaaggaaagatgatggagaaaatgctaaaccaattaaaaaaattatcggtgatggaactagagatccatgtctaccatactcttggatctctccaaccacaggcattataatcagcgatttgacgatggagatgaacagattccggctgattgggccactttcccactccatcctaactgaagcaataaaagctgcttctgtccacactgtgggagaggacacagaggagacacctcaccgctggtggatagaaacctgtaagaaacctgacagcgtttcccttcattgcagacaagaagccattttcgagttgttgggaggaataacatcaccagcagaaattccggcaggtactattctgggactgacagttggggatcctcgaataaatttgccccaaaagaagtccaaagctttgcccaatccagaaaaatgccaagataatgagaaagttagacagctgcttctggagggtgtgcctgtggaatgtacgcatagctttatctggaaccaagatatctgtaagagtgtcacagagaataaaatctcggatcaggatttaaaccggatgaggagtgaattgctggtgcctgggtcacagcttattttaggtccccatgaatccaagatacctatacttttgattcagcagccaggaaaagtgactggtgaagatcgactaggctggggaagtggctgggatgtcctactcccaaagggctggggcatggctttctggattccatttatttatcgaggtgtgagagtcggagggttgaaagagtctgcagtgcattctcagtataagaggtcgcctaatgtcccaggcgattttccagactgccctgccgggatgctgtttgcggaagagcaagctaagaatcttcttgaaaagtacaaaagacgccctcctgcaaaacggcccaactacgttaagcttggcactctggcacctttctgctgtccctgggagcagttaactcaagactgggagtcaagagtccaggcttacgaagaaccttctgtagcttcatctccaaatggtaaggagagtgacctaagaagatctgaggtgccttgtgctcccatgcctaaaaaaactcatcagccatctgatgaagtgggcacatccatagagcaccccagggaggcagaggaggtaatggatgcagggtgtcaagaatcggcagggcctgagaggatcacagaccaggaggccagtgaaaaccatgttgctgccacagggagtcacctctgcgttctcaggagtagaaaattactgaagcaactgtcagcctggtgtgggcccagttctgaggatagtcggggaggccggcgagctcccggcagaggccagcaaggattgaccagagaggcttgcctgtccatcttgggccacttccccagggccctggtttgggtcagcctgtccctgctcagcaagggcagccccgagcctcacaccatgatctgtgtcccagccaaggaggacttcctccagctccatgaggactggcattactgtgggccccaggaatccaaacacagtgacccattcaggagcaagatcctgaaacagaaagagaagaagaaaagggagaagaggcagaagccaggacgtgcctcttctgatggcccggcgggggaagagcccgtggctgggcaggaagctctgactctagggctgtggtcaggccctctgccgcgtgtgacgttgcactgctccagaactctcctaggctttgtgactcagggagatttttccatggctgttggctgtggagaagccctggggtttgttagcttgacaggcttgctggatatgctgtccagccagcctgcagcgcagaggggcttagtgctactgaggcctcccgcctctctgcagtatcgatttgcgaggattgctattgaggtgtgaatgcgtgcttgtatcccagcagggcatagataatacgttattattgtctgccaagttctacatgtggagaatctgcttctgctttaaaatatcatgtgaaactccctggaaacaagaataaaaaattatgtattatgcaga

SEQ ID NO: 48673 - DNA, 2736 bp, Homo Sapiens
atggtatgcgagggaaagcgatcagcctcttgcccttgtttcttcctcttgaccgccaagttctactggatcctcacaatgatgcaaagaactcacagccaggagtatgcccattccatacgggtggatggggacattattttggggggtctcttccctgtccacgcaaagggagagagaggggtgccttgtggggagctgaagaaggaaaaggggattcacagactggaggccatgctttatgcaattgaccagattaacaaggaccctgatctcctttccaacatcactctgggtgtccgcatcctcgacacgtgctctagggacacctatgctttggagcagtctctaacattcgtgcaggcattaatagagaaagatgcttcggatgtgaagtgtgctaatggagatccacccattttcaccaagcccgacaagatttctggcgtcataggtgctgcagcaagctccgtgtccatcatggttgctaacattttaagactttttaagatacctcaaatcagctatgcatccacagccccagagctaagtgataacaccaggtatgactttttctctcgagtggttccgcctgactcctaccaagcccaagccatggtggacatcgtgacagcactgggatggaattatgtttcgacactggcttctgaggggaactatggtgagagcggtgtggaggccttcacccagatctcgagggagattggtggtgtttgcattgctcagtcacagaaaatcccacgtgaaccaagacctggagaatttgaaaaaattatcaaacgcctgctagaaacacctaatgctcgagcagtgattatgtttgccaatgaggatgacatcaggaggatattggaagcagcaaaaaaactaaaccaaagtgggcattttctctggattggctcagatagttggggatccaaaatagcacctgtctatcagcaagaggagattgcagaaggggctgtgacaattttgcccaaacgagcatcaattgatggatttgatcgatactttagaagccgaactcttgccaataatcgaagaaatgtgtggtttgcagaattctgggaggagaattttggctgcaagttaggatcacatgggaaaaggaacagtcatataaagaaatgcacagggctggagcgaattgctcgggattcatcttatgaacaggaaggaaaggtccaatttgtaattgatgctgtatattccatggcttacgccctgcacaatatgcacaaagatctctgccctggatacattggcctttgtccacgaatgagtaccattgatgggaaagagctacttggttatattcgggctgtaaattttaatggcagtgctggcactcctgtcacttttaatgaaaacggagatgctcctggacgttatgatatcttccagtatcaaataaccaacaaaagcacagagtacaaagtcatcggccactggaccaatcagcttcatctaaaagcaagtatcgtggaagacatgcagtgggctcatagagaacatactcacccggcgtctgtctgcagcctgccgtgtaagccaggggagaggaagaaaacggtgaaaggggtcccttgctgctggcactgtgaacgctgtgaaggttacaactaccaggtggatgagctgtcctgtgaactttgccctctggatcagagacccaacatgaaccgcacaggctgccagcttatccccatcatcaaattggagtggcattctccctgggctgtggtgcctgtgtttgttgcaatattgggaatcatcgccaccacctttgtgatcgtgacctttgtccgctataatgacacacctatcgtgagggcttcaggacgcgaacttagttacgtgctcctaacggggatttttctctgttattcaatcacgtttttaatgattgcagcaccagatacaatcatatgctccttccgacgggtcttcctaggacttggcatgtgtttcagctatgcagcccttctgaccaaaacaaaccgtatccaccgaatatttgagcaggggaagaaatctgtcacagcgcccaagttcattagtccagcatctcagctggtgatcaccttcagcctcatctccgtccagctccttggagtgtttgtctggtttgttgtggatcccccccacatcatcattgactatggagagcagcggacactagatccagagaaggccaggggagtgctcaagtgtgacatttctgatctctcactcatttgttcacttggatacagtatcctcttgatggtcacttgtactgtttatgccattaaaacgagaggtgtcccagagactttcaatgaagccaaacctattggatttaccatgtataccacctgcatcatttggttagctttcatccccatcttttttggtacagcccagtcagcagaaaagatgtacatccagacaacaacacttactgtctccatgagtttaagtgcttcagtatctctgggcatgctctatatgcccaaggtttatattataatttttcatccagaacagaatgttcaaaaacgcaagaggagcttcaaggctgtggtgacagctgccaccatgcaaagcaaactgatccaaaaaggaaatgacagaccaaatggcgaggtgaaaagtgaactctgtgagagtcttgaaaccaacacttcctctaccaagacaacatatatcagttacagcaatcattcaatctga

SEQ ID NO: 48674 - DNA, 2262 bp, Homo Sapiens
gttggcaggatcacagcaggtgtggaggggaggtcactgggaattccctggagactcagtcgttacccactcaactggaaggctgagcatggctttttcctctgatggttacccatgccaggccccacctctccatgtccaatgttctttctttatttgtttgtttgtttgtttgtttgtttagagacggagtctggctctgttgcccaggctggagtgcagtggcacgatctcagctcactacaacctccgcctcctgggtacaagcgattctcctgcctcagcctcctgagtagctgggattacaggtgcacgccaccatgcccggctaatttttgtatttttagtagagacagggtttcaccatgttgcccaggctggtcccgaactcctgatctcaggtgatctgcccaactcagcctcccaaactgctgggattataggcgtgagccaccacgcccagtccatttccaattttccatccagtggtggcagaacaaacttggatgggccccagtgctctgctggaaccaggaccctcacccagctgcctccagctgggcctgcccacccctgctgacctcctacatgcagagaacagggcttctctgctcttcaggcctgaagctgtgatgtccacaggacctaggaaccacgcacaccccctgaagctggaacaccaggcatgggtgagtcctgggtggctggatcttgtcaagatgggtgaaagggcagcttctgcaagcaggacccatcctcagtggactggatcatcttcagcgttctcattctcagccgcattctctgggaacagggaaagaggttcctgtctgaatcttcagcatgggctatgcactggtggccccttcctgcttggccactgtgccaggtgagcctacaatgagatgaaatggtgacgtgggacaagtggctctctgcagccacctccagcaccaccctgcctgggaaggcaggggtcagaggggtgggtgtgaaggggttggagtgcacaggtagaggtggctggggtcttcactgtgttggggagggtctcatcgccttgagactctgcagcgtctcctcagaggccttgtcgggaagcagcacctccacagtgtagctgagcttcttggcatgcatccggctgtaggtgttgtcgaagcgcaggacatctgcagtgatggagaggtgatcagggagcacaaaccccgcacatctgcaggaagagccagccctgcatgggtgcatccctggaacccttgggaatgagctgcatccctggaacgtcctgcatccctggaacccttggaaatgagctgtccaggacagtgggtggggcctgagggccagcctgtgcccagccctaagcccattgctcgctgccatctccatggtggcttgcgctacatgaaggaatcatgatggtcatcagcatatagaacagcacacagccagggagcaggcggcctgggaacgggatctcgagctccacctgcagggaggagctgtggcccacggacacagtatgctcgtactgcgtcctcgcctagttgcggttgcacaggtagctcttgggcctctccatgaaccatggattccatcacacattatagcccctgaatcctcaaagcagccccatgtggaaggcaatgtcatcctcattttacagaggagaaaactgaggcttggagaggtgatatgatctttcagcggtcacagagcaagggaggggaggtactgggattcctttatccagatatgtgcccaggtgtagagtggctgccatccctacctgagcacacagcccgggaacaggatctcgttctccacctgcagggaggagccgcggcccacggacctcgtgtgctcatactgcagcctcacctgctcgcacaggcagatggacacaaccagggggccacgtcgctcacctcccagaatcacaatcttcctgcgtgtctcctcactcatgaacgacttgaccaagttgaaggccacggggaacagttttggggctgaaacacatgtaaatctcttgagaagctggaccagaaaggacgtggggatacagagccacagccaagagcaggtgctggacaggaggtggacagatatggattctgccactctctgctgtgtgaccttcagcaagttacccaccctctccaagtcttagtgcagttaactggaaaatgaaggtgaaataatgtatgtataacacctggcacagttcctggctttcaataaatggttgtctcaggc

SEQ ID NO: 48675 - DNA, 648 bp, Homo Sapiens
atgtcagtgtcggggcaccgcactcagactgctggcggcgaggacccaggggccctgcggggtcagcggcgatgtgcgagcagggtcctcggagccccagggcccacctttgacaagcgctggaggagaacctgtgctgggggtccctgtgctgggggcatccctgtgctggaggtctctgtgctggcgggatccctgtactgtgggggggtccctgtgcctgtgctggggggctctgtgctgcgggccctgtgccgggggcatccctgtgctggggggatccctgtgctggggggccctgtgctgggggcatccctgtgctggaggtctctctgctggggggatccctgtactgggggggggcctgtgcctgtgctggggggctctgtgctgcgggccctgtgctgggggcatccctgtgctggggggatccctgtattggggggccctgtgctggggggatccctgtgctggaggtctctgtgcttggggggatccctgtactggggaggagtccctgtgctggatccctgtgctgcgggccctgtgctggggggatccctgtgctgggggccctgtgctggggggccctgtgctggggggatccctgggctgggggggtccctgtgctggggggccctgtgctga

SEQ ID NO: 48676 - DNA, 321 bp, Homo Sapiens
gtagcgctcccttttgggatcaacgagctgtgtggcgcctgtgcggcttctgagagaccggctggtggcgcttggcggcttcctgccaatccacccttctcctcccgcgcaagggggcaatcccaatcccaccaccgggaacacccaggccaaaagaacgggagttacactcaaagtcttcccccttcttatcactcctgccgatttccctcttcctttttgcacgcctccactcttccccaccggaaacgccgccccttcctcctacagttcctcccagcagtccctcaacgcctgtcttccctcgcgcgtagagagtga

SEQ ID NO: 48677 - DNA, 1914 bp, Homo Sapiens
gccggggaccacacagagaataacttgtctgactaccagtattcttggatgcagaagtgctgaagatgagcacacacacgtacggagaatttctggagaattcagctgctcagaacaagaactgagatccagagagatgatgactttgcccatagaccaaacaaagaaatacatgtttcagtcctgtgtcctcctgctatgtgtgtccggaattggtgggttcttggtctcactgacttcaagaatgaagctgcggaccctcgcggtgagtgttacagttcttaaaggcagtgtgtccagagtttgttcctactgatgtgtggatgtgttcggagtatcttccttctggtgggttcgtggtctcgctggctcaggagtgaagctgcagaccttcgtggtgagtgttacagctcttaaggtggtgcgtctggagttgttcattcctcccagcgggctcgtggtctcactggcttcaggagtgaagctgcagaccttcgcggtgagtgttacagctcataaaggcagcgtggacccaaagagtgagaagtagcaagatttattgcgaagagcgaaagaacaaagcttccacgatgtggaaggagaccccagcagattgccactgctggcttgggcagcctgcttttattctcttatttggcccccacccacatcctggtgattggtagagcccagtggtctgttttgacagggcgctgattggtgcgtttacaatcactgagccagatacaaaggttctccaggtccccactagattagctagatacagagtgtctattggtgcattcacaaaccctgagctagacacagggtgttgattggtgtgtttacaaaccttgagctagagacagagtgccgattggtgtatttacaatccctgagctagacacaaaggttctccacgtccgcaccagactcaggagcccagctggcttcacccagtggatcccgcactgcccctgcaggtggagctgcctgccagtccctcgcggtgcgcccgcactcctcagcccttgggtggtcgatgggactgggcgctgtggagcaggaggcggcgcttgctggggaggctcctgcggcacaggtgcccacggagggggtgggaggctcaggcatggcgggctgcaggtcccgagccctgccccttgggaaggcagctagggccccgggagaaatcgagcgcagcgccggtgggtcagcactgctgggggacccagtacaccctccacagccactggctcgggtgctaagcccctcattgcctggggccggcagggcctgccggctgctccgagtgcgggccgccaagctcacacccacccagaactccagctggcctgcaagcgtcgcgtgcagccccggttcctgctcgcacctctccctccacacctccctgcaagctgagggagccggctccggccttggcaagcccagaaaggggctcccacagtgcagcggtgggctgaagggctcctcaagtgccgccaaagtgggagcccaggcagaggaggcaccgagagcgagtgagggctctgaggactgccagcacgctgtcacctctcactagtagctatcctacttttaaataaagaattaggctgggcacggtagctcacgcctgtaatcccagcacttcgggaggccaaggggggtggatcacctgaggtcaggaattcgagaccagcctggccaacatggcaaaaccccatctctactaagaatacaaaaatttgccaggcatggtggcgggtgcctgtaatcccagctgcttgagagactgaggtgggagaatcacttgaacccgggaggcgaaggttgcggtaagccgagattgcaccacggtgcttcggcctgggcggcagagtgagactctgtttcaaaaaaaaaaaaaaaaga

SEQ ID NO: 48678 - DNA, 314 bp, Homo Sapiens
gaccaatgccacttgttcttcaggagactgagctaaacattatgcgtcatgagaaatgttgtgagatgctcaagaacaagaatatatccaagagtaaaatggtcacgagggggaccgtctgtggctataatgaccaagggaaggatgcctgtcagggagattctggggggcccctggtctgtgaattaaatggcacatgggtccaggtggggattgtgagctggggcattggctgcggtcgcaaaggataccctggagtttacacagaagttagtttctacaagaaatggattattgatcacctgagacaagct

SEQ ID NO: 48679 - DNA, 1785 bp, Homo Sapiens
atgacctcctgtgacgaatcaaagagattccgggaggaaaatactgtagtgtcatcagaccctacaaaaacagctgcaagagatatcatcgattatgaaagtgatgttgaacctgaaacgaaaagattgaaattggctgcctcggaagaccactgcagtccgtcggaagagacaccatcccagtccaagcaaatccgaactccactcgtggaaagtgtacaggaggccaaggcccagttaaccaccccagcctttcctgtagagggctggcaatgtagtctctgcacctatatcaataattcagagttaccttattgtgaaatgtgtgagactcctcaaggcagtgctgttatgcaaatagatagcctcaaccatatccaggataaaaacgagaaggatgattctcagaaagacacctccaaaaaggttcaaactatctcagactgtgaaaaacaagcccttgcacagtcagaacctggccagttggctgacagcaaggaagaaacaccaaaaattgagaaagaagacggacttacatcccagccagaacagtggaagagttcagacactttgccagtgtatgacaccttaatgttctgtgcaagtaggaatactgaccggattcacatctatactaaggatggaaaacagatgagctgtaatttcattcctctggatataaaattagacctttgggaagatttaccagcaagctttcagctgaaacaatatcgctcactgattttgagatttgttcgagaatggagtagtctaactgccatgaagcaaaggataatcaggaaaagtggacagctattctgtagcccaattcttgctttggaagagatcacaaagcaacaaaccaaacaaaattgcaccaaaagatacataaccaaagaagatgttgccgtagcctcaatggacaaagtgaagaatgttgggggccatgtccgtctgatcacaaaggagtccaggccacgggatcctttcacaaaaaaacttcttgaagatggagcctgtgtcccatttctaaatccatacacagtccaggcagatctcactgtgaagccctctacatccaaaggctatttgcaagctgtggataatgaaggaaatccactttgccttcgctgtcagcaacccacttgccagactaagcaagcatgtaaagcgaactcttgggattcacggttttgctctctgaaatgtcaggaagagttttggattcgatctaataacagttacctgagagccaaagtatttgaaactgaacatggtgtgtgtcagctctgtaatgtgaacgcacaagaactctttttacgtctgagagatgcccctaaaagtcagaggaagaatcttctgtatgctacctggacttcaaagctcccattagaacagctaaatgaaatgataagaaacccaggggaaggacatttctggcaggtggatcacatcaagccagtgtatgggggaggaggacagtgttccctggacaacctgcagactctctgcacagtctgtcacaaagagagaactgccagacaagctaaggaaagaagccaggtgagaagacaatctctagcatcaaagcatggatcagacatcacacgatttttgctgcatgaatcacacaaggtaacaggtgccgagcaaggtctgcaggtttctggattgccagatagtgcagcacctgaaggaggtgcagcgcacacaaatgatcagcgcaggtgtcaaaggatgaagcagccacttacagaagtgcaaatcctcagccactcatcttaa

SEQ ID NO: 48680 - DNA, 4268 bp, Homo Sapiens
ggcaagagcagcgaccgcggcacctgtccgcccggagctgggacgcgggcgcccgggcggccggacgaagcgaggagggaccgccgaggtgcgcgtctgtgcggctcagcctggcgggggacgcggggagaatgtggactgggtagagatgaacgagacttttctcagatgttggatatttgcttggaaaaacgtgtgggtacgaccttggctgcccccaagtgtaactccagcactgtgaggtttcagggattggcagaggggaccaaggggaccatgaaaatggacatggaggatgcggatatgactctgtggacagaggctgagtttgaagagaagtgtacatacattgtgaacgaccacccctgggattctggtgctgatggcggtacttcggttcaggcggaggcatccttaccaaggaatctgcttttcaagtatgccaccaacagtgaagaggttattggagtgatgagtaaagaatacataccaaagggcacacgttttggacccctaataggtgaaatctacaccaatgacacagttcctaagaacgccaacaggaaatatttttggaggatctattccagaggggagcttcaccacttcattgacggctttaatgaagagaaaagcaactggatgcgctatgtgaatccagcacactctccccgggagcaaaacctggctgcgtgtcagaacgggatgaacatctacttctacaccattaagcccatccctgccaaccaggaacttcttgtgtggtattgtcgggactttgcagaaaggcttcactacccttatcccggagagctgacaatgatgaatctcacacaaacacagagcagtctaaagcaaccgagcactgagaaaaatgaactctgcccaaagaatgtcccaaagagagagtacagcgtgaaagaaatcctaaaattggactccaacccctccaaaggaaaggacctctaccgttctaacatttcacccctcacatcagaaaaggacctcgatgactttagaagacgtgggagccccgaaatgcccttctaccctcgggtcgtttaccccatccgggcccctctgccagaagactttttgaaagcttccctggcctacgggatcgagagacccacgtacatcactcgctcccccattccatcctccaccactccaagcccctctgcaagaagcagccccgaccaaagcctcaagagctccagccctcacagcagccctgggaatacggtgtcccctgtgggccccggctctcaagagcaccgggactcctacgcttacttgaacgcgtcctacggcacggaaggtttgggctcctaccctggctacgcacccctgccccacctcccgccagctttcatcccctcgtacaacgctcactaccccaagttcctcttgcccccctacggcatgaattgtaatggcctgagcgctgtgagcagcatgaatggcatcaacaactttggcctcttcccgaggctgtgccctgtctacagcaatctcctcggtgggggcagcctgccccaccccatgctcaaccccacttctctcccgagctcgctgccctcagatggagcccggaggttgctccagccggagcatcccagggaggtgcttgtcccggcgccccacagtgccttctcctttaccggggccgccgccagcatgaaggacaaggcctgtagccccacaagcgggtctcccacggcgggaacagccgccacggcagaacatgtggtgcagcccaaagctacctcagcagcgatggcagcccccagcagcgacgaagccatgaatctcattaaaaacaaaagaaacatgaccggctacaagacccttccctacccgctgaagaagcagaacggcaagatcaagtacgaatgcaacgtttgcgccaagactttcggccagctctccaatctgaaggtccacctgagagtgcacagtggagaacggcctttcaaatgtcagacttgcaacaagggctttactcagctcgcccacctgcagaaacactacctggtacacacgggagaaaagccacatgaatgccaggtctgccacaagagatttagcagcaccagcaatctcaagacccacctgcgactccattctggagagaaaccataccaatgcaaggtgtgccctgccaagttcacccagtttgtgcacctgaaactgcacaagcgtctgcacacccgggagcggccccacaagtgctcccagtgccacaagaactacatccatctctgtagcctcaaggttcacctgaaagggaactgcgctgcggccccggcgcctgggctgcccttggaagatctgacccgaatcaatgaagaaatcgagaagtttgacatcagtgacaatgctgaccggctcgaggacgtggaggatgacatcagtgtgatctctgtagtggagaaggaaattctggccgtggtcagaaaagagaaagaagaaactggcctgaaagtgtctttgcaaagaaacatggggaatggactcctctcctcagggtgcagcctttatgagtcatcagatctacccctcatgaagttgcctcccagcaacccactacctctggtacctgtaaaggtcaaacaagaaacagttgaaccaatggatccttaagattttcagaaaacacttattttgtttcttaagttatgacttggtgagtcagggtgcctgtaggaagtggcttgtacataatcccagctctgcaaagctctctcgacagcaaatggtttcccctcacctctggaattaaagaaggaactccaaagttactgaaatctcagggcatgaacaaggcaaaggccatatatatatatatatatatatctgtatacatattatatatacttatttacacctgtgtctatatatttgcccctgtgtattttgaatatttgtgtggacatgtttgcatagccttcccattactaagactattacctagtcataattattttttcaatgataatccttcataatttattatacaatttatcattcagaaagcaataattaaaaaagtttacaatgactggaaagattccttgtaatttgagtataaatgtatttttgtcttgtggccattctttgtagataatttctgcacatctgtataagtacctaagatttagttaaacaaatatatgacttcagtcaacctctctctctaataatggtttgaaaatgaggtttgggtaattgccaatgttggacagttgatgtgttcattcctgggatcctatcatttgaacagcattgtacataacttgggggtatgtgtgcaggattacccaagaataacttaagtagaagaaacaagaaagggaatcttgtatatttttgttgatagttcatgtttttcccccagccacaattttaccggaagggtgacaggaaggctttaccaacctgtctctccctccaaaagagcagaatcctcccaccgccctgccctccccaccgagtcctgtggccattcagagcggccacatgacttttgcatccattgtattatcagaaaatgtgaagaagaaaaaaatgccatgttttaaaaccactgcgaaaatttccccaaagcataggtggctttgtgtgtgtgcgatttgggggcttgagtctgggtggtgttttgttgttggtttttgttgctttttttttttttttttttttaatgtcaaaattgcacaaacatggtgctctaccaggaaggattcgaggtagataggctcaggccacactttaaaaacaaacacacaaacaacaaaaaacgggtattctagtcatcttggggtaaaagcgggtaatgaacattcctatccccaacacatcaattgtattttttctgtaaaactcagattttcctcagtatttgtgtttttacattttatggttaatttaatggaagatgaaagggcattgcaaagttgttcaacaacagttacctcattgagtgtgtccagtagtgcaggaaatgatgtcttatctaatgatttgcttctctagaggagaaaccgagtaaatgtgctccagcaagatagactttgtgttattctatcttttattctgctaagcccaaagattacatgttggtgttcaaagtgtagcaaaaaatgatgtatatttataaatctatttataccactatatcatatgtatatatatttataaccacttaaattgtgagccaagccatgtaaaagatctactttttctaagggcaaaaaaaaaaaaaaaaa

SEQ ID NO: 48681 - DNA, 1191 bp, Homo Sapiens
cctggagctactgcttggttccctgagaggtcccagaactctgcaaagtgagtccagcgctgagatttttcttgcagatctatcaggatgagcatccaggccccacccagactcctggagctggcagggcagagcctgctgagagaccaggccttgtccatctctgccatggaggagctgcccagggtgctctatctcccactcttcatggaggccttccgcaggagacacttccagactctgacggtgatggtgcaggcctggcccttcacctgcctccctctgggatcactgatgaagacgcttcatttggagaccttaaaagcattgctggaagggcttcatatgctgcttacacagaaggatcgccccaggaggtggaaacttcaagtgctggatttgcgggatgttgatgagaatttctggaccatatggtctggagccagggtcctctcctgctccccagaggccatgatgcaggactgtccaaggatgagaggacggcagcccttgactgtgttcgtagaactttggctcaagaacaggactctggatgaatacctcacctacctccttctatgggtcaagcagaggaaagatttactacacctgtgctgtaagaagctgaaaattttgggaatgcccttccgcaatatcagaagcatcctgaaaatggtgaacctagactgtatccaggaggtggaagtgaattgcaagtgggtactgcccatcctgacacagtttaccccatacctgggccacatgaggaatcttcagaagctcgttctctcccacatggatgtctctcgctacgtttccccagagcagaagaaggagattgttacccagttcaccactcagttcctcaagctgcgctgcctccaaaagctttatatgaactctgtttctttcctcgaaggccacctggaccagctgctcaggtgcctcaagaaccccttgggaacctttatattctgtcatgcttacctagctgatcaggacatggagtgtctgtctcagtacccaagcctcagtcagctaaaggagctgcatctgattcatatcctaatgtggactaccaatcttgagccccttggagctctgctagagaaagttgctgctactctcgagatcctcacgttaaaggactgtcagatccaggactcccagctcagggtcctcctgcctgcc

SEQ ID NO: 48682 - DNA, 2436 bp, Homo Sapiens
gggcagatggacactgctgaagacccggcctggctccagctgcttcaaaaggattccagccccccaggaccccgacccacagccttcttctgcccacaggatgggagcctgggggctggcagctcggctatgagggattactgcccctcccagcaaaaggcaagccctgcaccccccaggcacacccctgaccaaagcccaggcatggagtctagacacagaagccccagtggggctggggaaggggcctcctgctctgacggccccagagggagcctggcctgcccctccccaacctgcttctctccccaggagtcaccctccaaggagacattggaggcacatggagcctccatctcagggacaccagaagccaccacgtctgggaagccagagcctgtgtcctccgtgaaaactgagcccaaatcctcagatgacagaaatcccatgttcttagagaagatggatttcaagtcctcaaagcaggccgattccacttccataggaaaggaggatcctgggtcctcacggaaggcagatcccatgtttacaggaaaggcagagcctgaaatcttgggaaagggggatcctgtggctcctggaaggatggatcccatgactgtaagaaaggaagatcttggatccctgggaaaagtagatcctttgtgctccagcaagacgtatacagtgtcaccgaggaaggaggatcctgggtctttgagaaaggtggatcctgtgtcctcagacaaagtggaccctgtattcccaagaaaggaggagcccaggtattcaggaaaagagcatcctgtgtcctcagaaaaggtcgctcctacatctgcagaaaaggtagatcttgtattgtcgggaaagagagatcctgggccctcgggaaaggcagatcccatgcccttggaaagcatggattctgcgtccacaggaaagacagagccggggctcctgggcaagctgattccaggctcatcaggcaagaatgggcctgtatcctctgggaccggggctcctgggtccttgggaaggctggatcccacatgcttggggatggcagatcccgcatctgtgggaaatgtagaaactgtgcctgccacaaaagaggactcccggttcctgggaaagatggaccctgcctcctcaggagaggggcgtcctgtgtctggccacacggatactacggcttcagcaaagacagatctcacatctttgaaaaatgtggatcccatgtcttcaggcaaggtggatccagtttctctgggaaagatggaccccatgtgctcaggaaagccagagctcttgtctcctggacaggcagagcgtgtgtctgtgggaaaggcaggaactgtatccccaggaaaagaggacccggtgtcctccagaagggaggaccccatatctgctggaagtagaaagacatcatctgaaaaagtgaatcctgagtcttcaggaaagacaaaccctgtgtcttcaggtccaggcgatcccaggtccttggggacagcaggtcccccatctgcagtaaaggctgagccagcgacggggggaaaaggagatcccctgtcctcggagaaggcaggtctggtggcctctggaaaggcggctcccacagcctcagggaaggccgagcccctcgcggtgggcaaggaggaccctgtgagcaagggaaaggcagacgctggcccctctggacaaggggactctgtgtctataggtaaagtggtctcaactccaggaaaaacagtcccggtgccctcggggaaggtggatcccgtgtccctgggaaaagcagaagctatcccagagggaaaagtgggttctctgcctctagagaaggggagtcctgttaccaccacaaaggcggatcccagggcctcggggaaagcacagccgcagtctggtggcaaagcagaaacaaagctccctgggcaagagggcgctgcagcaccaggggaagcaggggctgtgtgtttgaaaaaggagacaccacaggcctcagagaaggtggatcctggatcctgcagaaaagcagagccccttgcctcagggaagggagagcctgtgtccctggggaaagccgactctgcaccttccagaaaaacggagtccccatccttggggaaggtggtccccctgagtctggagaagaccaagccgtcctcctcctccaggcagttagaccgcaaagccctcggctcagcccggtctcccgagggtgccaggggcagtgaaggccgcgtggagccgaaggccgagcccgtatggcgccgccaagcgtccgcccggcctgttccgcgcgctgctgcagagtgtgcgccggccgcggtgctgctcgcgggcgggacccacggccgagtgatctgcccccattttgtacgcccgagtttccgaccttctcaggctcccttcttgatcacaggcccctag

SEQ ID NO: 48683 - DNA, 924 bp, Homo Sapiens
atgttgtccccaaaccacaccatagtgacagaattcattctcttaggactgacagacgacccagtgctagagaagatcctgtttggggtgttcctggcgatctacctaatcacactggcaggcaacctgtgcatgatcctgctgatcaggaccaattcccaactgcaaacacccatgtatttcttccttggtcacctctcctttgtagacatttgctattcttccaatgttactccaaatatgctgcacaatttcctctcagaacagaagaccatctcctacgctggatgcttcacacagtgtcttctcttcatcgccctagtgatcactgagttttacttccttgcttcaatggcattggatcgctatgtagccatttgcagccctttacattacagttccaggatgtccaagaacatttgcatctctctggtcactgtgccttacatgtatggcttccttaatgggctctctcagacactgctgacctttcacttatccttctgtggctcccttgaaatcaatcatttctactgcgctgatcctcctcttatcatgctggcctgctctgacacccgtgtcaaaaagatggcaatgtttgtagttgcaggctttactctctcaagctctctcttcatcattcttctgtcctatcttttcatttttgcagcgatcttcaggatccgttctgctgaaggcaggcacaaagccttttctacgtgtgcttcccacctgacaatagtcactttgttttatggaaccctcttctgcatgtacgtaaggcctccatcagagaagtcagtggaacagtccaaagtcattgctgttttctacacttttgtaagccctatgttgaaccccatcatctatagtttgaggaacaaggatgtgaaacaagctttttggaaactgatcagaagaaac

SEQ ID NO: 48684 - DNA, 234 bp, Homo Sapiens
atgacaactctgagcaagtcaaaacaaccgtcagcagcgggaaacctcgatgaacaaacaccgggagagtgtttctgcagatcctgctttgtgacttcgagtgaagtgtggaagcgctggaagcacttagaccctgcctgtgccgcagacccctgggaggcaccaacaccccggatcgagaagcccgatgggaaagaatgtctgggaaggacgtcatgcccgaggcttgcgtga

SEQ ID NO: 48685 - DNA, 294 bp, Homo Sapiens
gaggatcacagatgctggggcacctcaacctcagggagccgctcgagaagtttcttttctgaagtgtccacctccttctggtcaccggctggagctgggacaggtacatccacctgtgtctgggtggaacttgagctgcccctcagggtgggcagccggggccttgtggccttgctgctgctgctgctgctgcttccgctgctccatgtgcagcacagcctgtgggagctctctcttctgggcctccaggcggccctgggaccgccctagagcctctgtctcctggctgaggcg

SEQ ID NO: 48686 - DNA, 583 bp, Homo Sapiens
agcccgacctcaccaggagaacatgcagctcggcactgggctcctgctggccgccgtcctgagcctgcagctggctgcagccgaagccatatggtgtcaccagtgcacgggcttcggagggtgctcccatggatccagatgcctgagggactccacccactgtgtcaccactgccacccgggtcctcagcaacaccgaggatttgcctctggtcaccaagatgtgccacataggctgccccgatatccccagcctgggcctgggcccctacgtatccatcgcttgctgccagaccagcctctgcaaccatgactgacggctgccctcctccaggcccccggacgctcagcccccacagcccccacagcctggcgccagggctcacagctgcccctccctcgagactggccagcccacctctcccggcctctgcagccaccgtccagcaccgcttgtcctagggaagtcctgcgtggagtcttgcctcaatctgctgccgtccaagcctggggcccatcgtgcctgccgccccttcaggtcccgacctccccacaataaaatgtgattggatcgtgtggtacaa

SEQ ID NO: 48687 - DNA, 939 bp, Homo Sapiens
atgaccaatcagacacagatgatggaattcttgcttgtgagatttactgagaattgggtgctcctgaggctgcatgctttgctcttctcactgatctacctcacggctgtgctgatgaatttagtcatcattctcctcatgattctggaccatcgtctccacatggcaatgtactttttcctccgacatttgtccttcttagacctgtgtctcatttctgccacagtccccaaatccatcctcaactctgtcgcctccactgactccatctccttcctggggtgtgtgttgcagctcttcttggtggtactgctggctggatcagagattggcatccttactgccatgtcctatgaccgctatgctgccatctgctgccccctacactgtgaggctgtcatgagcagagggctctgtgtccagttgatggctctgtcctggctcaacagaggggccttgggactcttgtacacagctggaacattctctctgaatttttatggctctgatgagctacatcagttcttctgcgatgtccctgccctactaaagctcacttgttctaaagaacatgccatcattagtgtcagtgtggccattggggtctgttatgcattttcatgtttagtttgcattgtagtttcctatgtgtacattttctctgctgtgttaaggatatcacagagacagagacaatccaaagccttttccaactgtgtgcctcacctcattgttgtcactgtgtttcttgtaacaggtgctgttgcttatttaaagccagggtctgatgcaccttctattctagacttgctggtgtctgtgttctattctgtcgcacctccaaccttgaaccctgttatctactgtctgaagaacaaggacattaaatccgctctgagtaaagtcctgtggaatgttagaagcagtggggtaatgaaa

SEQ ID NO: 48688 - DNA, 504 bp, Homo Sapiens
aaaaaaggagtccccgtgagggtgaccagcgtcaaggatggcaccacccaccagacctccttggagctcttcatgtacctgaacgaagttgcaggcaagcacggtgtgggcttattgccatcgtggagaacacttcaccagacaaaggcccaaggtatctaccagaccccagtaggcaccatcctttaccatgctcatttagacatcaaggtcttcaccacagaccgggaagtgcacaaaaccaatcaccctgagtgtgaatttgtccgcccctgcatcgccaagtcccaggagccggcagaagggaaagtgcaggtgccggtcctcaagggccaggtgtacatccttggctgggagtccccactgtctctctacaatgaggagctgatgagcgtgaacgtgcagggtgattatgagccgattgatgacaccgggttcatcaacatcaactccctcagactgaaggaataccattgtctccagagtaagttcactgccagatag

SEQ ID NO: 48689 - DNA, 1499 bp, Homo Sapiens
gtcacgggattcggagccgggcggctacgggcggggtgtcgcagctctcttcgacgtacctgtcctcaggagccgcggcggcgactgcgcctcggacggccgtcggggccgagaaccatgagccccaggggcacgggctgctccgccgggctgctgatgactgtcggctggctgcttctggcgggcctccagtccgcgcgcgggaccaacgtcaccgctgccgtccaggatgccggcctggcccacgaaggcgagggcgaggaggagaccgaaaacaacgacagcgagaccgcggagaactacgctccgcctgaaaccgaggatgtttcaaataggaatgtcgtcaaagaagtagaattcggaatgtgcaccgttacatgtggtattggtgttagagaagttatattaacaaatggatgccctggtggtgaatccaagtgtgttgtacgggtagaagaatgccgtggaccaacagattgtggctggggtaaaccaatttcagaaagtcttgaaagtgttagattggcatgtattcacacatctcccttaaatcgtttcaaatatatgtggaaacttctaagacaagaccaacaatccattatacttgtaaatgattcagcaatcctagaagtacgcaaggaaagtcaccccttggctttcgagtgtgacacactggataataatgaaatagtagcaactattaaattcacagtctatacgagcagtgaattgcagatgagaagatcaagcctaccagccactgatgcagccctaatttttgtgctgaccataggagtcattatctgtgtatttataattttcttattgatcttcataatcataaattgggcagcagtcaaggctttctggggggcaaaagcctctacacctgaggtacaatccgagcagagttctgtgagatacaaagattcaacttctcttgaccaattaccaacagaaatgcctggtgaagatgatgctttaagtgaatggaatgaatgatgtttgaatgatatataacaaaccaaaggatattacagaatattagattcattattacaaaaataaaatacacattgaaatactttaataatgttgcgatggattgccacagtgtgaaggaaatgcagtgtggggataggactattttatcagtgcatttttccagtacagttatcaaatattacttttaatttgttctcaacacttatttcaggtaatagcttggggatatttatctaaaggtacccccaacaaatcttctaagtgcatttttgatcactttgataacttcttaggtgatttgcctgttttgtcttaaataagaacaatgtaatatagaaatgctttacatattagactttctctcccctggaagcactgggttgaacttgctaaagtaaatcatactttagaatctcttcagggaatgtgacatacaaagtttgtaagacatgaagtaataacgataatgataacaataaatgcttacttagtga

SEQ ID NO: 48690 - DNA, 913 bp, Homo Sapiens
ggtttttttagacatttcaggtggcagaataaattcaatccttgtttctccatcttatcgagtagtagaagttagttacattctctttgaactcatcatgaattccatgaagactgaagaaaacaagtcatttagcgctatggaagatgaccagaggactagacctgaagtttcaaaggatactgtcatgaagcagacacatgctgacacacctgttgatcattgtctatctggcataagaaagtgtagcagcacctttaagcttaaaagtgaagtcaacaagcatgaaacagcccttgaaatgcagaatccaaatttgaacaataaagaatgttgtttcacctttacgttgaatggaaactccagaaaattagaccgtagtgtgtttacagcatatggtaaacccagcgagagtatctactcagccctgagtgctaatgactatttcagtgaaaggataaagaatcagtttaataagaacattattgtttatgaagaaaagacaatagatggacatataaatttaggaatgcctctcaagtgcctgcctagtgattctcattttaaaattacatttggtcaaagaaagagtagcaaagaagatggacacatattacgccaatgtgaaaatccaaacatggaatgcattctttttcatgttgttgctataggaaggacaagaaagaagattgttaagatcaacgaacttcatgaaaaaggaagtaaactttgtatttatgccttgaagggtgagactattgaaggagccttatgcaaggatggccgttttcggtctgacataggtgaatttgaatggaaactaaaggaaggtcataagaaaatttatggaaaacagtccatggtggatgaagtatctggaaaagtcttagaaatggacatttcaaaaaaaaaa

SEQ ID NO: 48691 - DNA, 1014 bp, Homo Sapiens
atgacaaacaacagcggctccaaagccgaactcgttgtgggagggaaatacaaactggtgcggaagatcgggtctggctcctttggagacgtttatctgggcatcaccaccaccaacggcgaggacgtagcagtgaagctggaatctcagaaggtcaagcacccccagttgctgtatgagagcaaactctacacgattcttcaaggtggggttggcatcccccacatgcactggtatggtcaggaaaaagacaacaatgtgctagtcatggaccttctgggacccagcctcgaagacctctttaatttctgttcaagaaggttcaccatgaaaactgtacttatgttagccgaccagatgatcagcagaattgaatacgtgcatacaaagaattttctacaccgagacattaaaccagataacttcctgatgggtactgggcgtcactgtaataagttgttccttattgattttggtttggccaaaaagtacagagacaacaggaccaggcaacacataccgtacagagaagataaacacctcattggcactgtccgatatgccagcatcaatgcacatcttggtattgagcagagccgccgagatgacatggaatccttaggctacgttttcatgtattttaatagaaccagcctgccgtggcaaggactaagggctatgacaaaaaaacaaaaatatgaaaagattagtgagaagaagatgtccacccctgttgaagttttatgtaaggggtttcctgcagaattcgccatgtacttgaactactgtcgtgggctgcgctttgaggaagtcccagattacatgtatctgaggcagctattccgcattcttttcaggaccctgaaccaccaatatgactacacatttgattggacgatgttaaagcagaaagcagcacagcaggcagcctcttccagtgggcagggtcagcaggcccaaacccagacaggcaagcaaactgaaaaaaacaagaataatgtgaaagataactaa

SEQ ID NO: 48692 - DNA, 397 bp, Homo Sapiens
ccaaggcagagccgagagagaagcccccctgtgggcagaaaggcctctcccacgaggacacactgggtgcctcaagcagacaagaggcgccggagccttccctcctcttacagacctgcccagccaagcccctctgctgtgcagacgccccccagcccacctgtgagccccagggtgctaagcccacccaccacaaagcggcgaacttccccaccgcaccagcccaagttgcccaaccctccccccgagagtgcacctgctcagtgcaaggtccccagccccccaacccagcacccagaagcaagcccccctttctcgattccctccccatcacccccaatcctcccaccttggaccccaccagcacctcttatgaatcccagctcggccagaacag

SEQ ID NO: 48693 - DNA, 831 bp, Homo Sapiens
gcaacacacagtgagcatcgagctctcatgtctgaactcaagatcctcattcatattggtcaccatctcaatgtggtcaaccttctaggtgcctgtaccaagccaggagggccactcatggtgattgtggaattctgcaaatttggaaacctgtccacttacctgaggagcaagagaaatgaatttgtcccctacaaggtatgtcatctcctaatcctgctctggccatgttataaaatgaagggaaactcaaaatggtacagcaaacttagaaacatcacactaactcatggaaatactgatctccatcctcctgcctctttggacagctccgaagatctgtataaggacttcctgaccttggagcatctcatctgttacagcttccaagtggctaagggcatggagttcttggcatcgcgaaagtgtatccacagggacctggcggcacgaaatatcctcttatcggagaagaacgtggttaaaatctgtgactttggcttggcccgggatatttataaagatccagattatgtcagaaaaggagatgctcgcctccctttgaaatggatggccccagaaacaatttttgacagagtgtacacaatccagagtgacgtctggtcttttggtgttttgctgtgggaaatattttccttaggtgcttctccatatcctggggtaaagattgatgaagaattttgtaggcgattgaaagaaggaactagaatgagggcccctgattatactacaccagaaatgtaccagaccatgctggactgctggcacggggagcccagtcagagacccacgttttcagagttggtggaa

SEQ ID NO: 48694 - DNA, 624 bp, Homo Sapiens
atggcatctctgagccagctgagtggccacctgaactacacctgtggggcagagaactccacaggtgccagccaggcccgcccacatgcctactatgccctctcctactgcgcgctcatcctggccatcgtcttcggcaatggcctggtgtgcatggctgtgctgaaggagcgggccctgcagactaccaccaactacttagtagtgagcctggctgtggcagacttgctggtggccaccttggtgatgccctgggtggtatacctggaggtgacaggtggagtctggaatttcagccgcatttgctgtgatgtttttgtcaccctggatgtcatgatgtgtacagccagcatccttaatctctgtgccatcagcatagacaggtacactgcagtggtcatgcccgttcactaccagcatggcacgggacagagctcctgtcggcgcgtggccctcatgatcacggccgtctgggtactggcctttgctgtgtcctgccctcttctgtttggctttaataccacaggggaccccactgtctgctccatctccaaccctgattttgatcctcactcgacagaacagtcagtgcaacagtgtcaggcctggcttcccccagcaagt

SEQ ID NO: 48695 - DNA, 936 bp, Homo Sapiens
atgagaagaaactgcacgttggtgactgagttcattctcctgggactgaccagtcgccgggaattacaaattctcctcttcacgctgtttctggccatttacatggtcacggtggcagggaaccttggcatgattgtcctcatccaggccaacgcctggctccacatgcccatgtactttttcctgagccacttatccttcgtggatctgtgcttctcttccaatgtgactccaaagatgctggagattttcctttcagagaagaaaagcatttcctatcctgcctgtcttgtgcagtgttacctttttatcgccttggtccatgttgagatctacatcctggctgtgatggcctttgaccggtacatggccatctgcaaccctctgctttatggcagcagaatgtccaagagtgtgtgctccttcctcatcacggtgccttatgtgtatggagcgctcactggcctgatggagaccatgtggacctacaacctagccttctgtggccccaatgaaattaatcacttctactgtgcggacccaccactgattaagctggcttgttctgacacctacaacaaggagttgtcaatgtttattgtggctggctggaacctttctttttctctcttcatcatatgtatttcctacctttacattttccctgctattttaaagattcgctctacagagggcaggcaaaaagctttttctacctgtggctcccatctgacagctgtcactatattctatgcaacccttttcttcatgtatctcagacccccctcaaaggaatctgttgaacagggtaaaatggtagctgtattttataccacagtaatccctatgctgaaccttataatttatagccttagaaataaaaatgtaaaagaagcattaatcaaagagctgtcaatgaagatatacttttcttaa

SEQ ID NO: 48696 - DNA, 3938 bp, Homo Sapiens
gctgcgaaggctcttgtggccgccaccccgggtgtctcctccactctgcgctcaccagcccctccttgggccgggcggcctgcggtgaccaccctgggccttcctggccggcccttctcctcccgagaggatgaggagagggctgtggcggaggcggcatggaggcggcggcggcgctggggggagctgagcgtggcggcggcggccggcggggggctggtcggcctggtatgctaccagctgtacggggaccccagggccggctcgccggcgaccgggcgaccctcaaagagcgcggccacggagcccgaggacccgccccgcggccgggggatgctgcccatcccagtggcggctgccaaggagacggttgctattggcagaacagacattgaagacttagacctttatgccacatctcgggagaggcgatttcgtttatttgcttctatagaatgtgaagggcagttattcatgactccgtatgattttattttggctgttacaacagatgagcccaaagttgccaaaacttggaagtcactttccaaacaggaattaaatcaaatgctcgcagaaacaccaccagtttggaaaggctcatcgaagctatttcgaaatcttaaagaaaaaggtgtgatttcttacacagaatatctttttcttttatgtattttaacaaagccacatgcagggttcagaatagctttcaacatgtttgacactgatggcaatgagatggtggataaaaaagagtttttggtgcttcaagagatattcaggaaaaaaaatgaaaagagagaaattaaaggagatgaagaaaagcgtgcaatgctgcgtcttcaactttatggataccattctcctactaatagtgtacttaaaacagatgctgaggaacttgtctccagaagctattgggatacactgagacgtaacacaagccaagcactgttttcagacctcgcagagcgtgctgatgacatcacaagtttagtaacagatactacacttcttgtacacttttttggaaagaaaggaaaagctgagctcaactttgaagatttttatagattcatggataatctccaaacagaagttctagaaatagaattcctttcctactcaaatggaatgaataccatcagtgaagaagattttgctcatattcttttacgatatacaaatgtggaaaatacatcagtatttttagaaaatgtgcgttacagtatacctgaagaaaagggcatcacatttgatgaattcaggtcatttttccagtttttaaacaacctagaagactttgcaatagccctgaatatgtataactttgcaagtcgttctatagggcaagatgaatttaaacgtgccgtctatgtagctactggactcaaattttcaccacatttagtgaacactgtcttcaagatttttgatgttgacaaagatgatcaattaagttataaagaatttattggaattatgaaagacagactccatagaggattccggggttataaaacagtccagaagtaccccactttcaaatcctgcctgaagaaagaacttcacagcagataaatactcctaaaacaaagtttaaaggattactatctgtgtgacaaataacaagaagcaacattttgagaatggaagcaggtctgaggtcagaagaagtagagaatgaaggaaaaggtgaatgctatgaaattgatattttttctggaactgaattcttaaacataaaacagataaaatgcatcttgttactacaaatgttatatatataaaatcaagttgagctttgccttgatttgctgaactctctgcactttttcattcccttcagaagtatatagatacttccggtgactacatatgaatgtactttcaatattatttttttatttattcattagaaattttcctcatttcaaaataatttatgactcatggaatgttgatcgcctaaaaatgaacatcgcattttctttgattttggactgtgaacttattttcagagatgaatattgcttgagatttataatacccttagaattaaattcctgttatttgcccagtttttaattacactgagataattttgaaaagaaatagaaattaagctactatataaaacaattgtttacgtgtacttttaacttttaaaagtacttaattaacatatgttgtttgacttgtataaagtttttaaaaattgttgtttatttgccaaagtcaacagaatgtctgttattgttttatgtatacggtaaagaaatttaaagtgtagaattttcctcccccaaaaagtcatgtgttgatagtagaagcagtggtagttgttgtaacagtaatcattgtcattgtcattatcttcttaaacatgaagctgctcctgatcataggtggtacacgttaataacactagtaaaaataacgtcttacactctgtaacttactgcatattgttaatgtatgtctagcatcaaatgagtattgtaaaagactaatataaaatggtttataagactgatgtatatattaagtagaagctaatatttttgtttcttgcaaaaggaccacttgaaaagtgatgctaaacagccagtaataataatttaaatataatttattatttcaaaagaatatgtcttaaaagggaaaataaaaactttctgttgaatcacaacaaaattagatttgtacatagagaaacaatttgataatacttaatagaaatctgttcaattaaaaatgcttagtttatacaaagatactacacaaaaatagaacaattagtctgaattaacgtatttacatattgcatatggaagataagttcatttatcttcctttctaagacatatttaatgtaggttacatacactccaactattactttgcttttgcatatgaaactagaaaacactgactttgtttttataagttattaaatgtgaaattgatctgcatcagcttatttataaaagtaatgttatttccaagaaaatgttactcttagcattgattttgtatgttagactttttacattgtttatctaatattatttatgacagtaattttaaaatatattattcataagttcaaggatcccatatagtataagaatataatttcacttgctttgaaagttgatttaattgactgactaaatgaaaatgcctacccactcatataacatacctcaggtctattttaccttacactgaatgttcttaatatgatttggtacctaaagtaattgaaaaaaatgcagtttcctttaatccttgactataagttatactatgttgcgtacatggcaaatcctgcaaatatagattaaaaattaaattagcccattgaaatcctttataattctgtcattttcccaaggaagaatagcattgtacatatgcaatctttattttattctttattgcttatcagagtgagtggatgaaaacatttgtaaggctgcaacataatattaaaatgtgaataaataaatgttctgataaaatagaaaagaaagtaaattacagtgatttccatcatattatcactcttgaattttatcatctataaaatgagagataaaaatatctcactgaattgttacttatatcaatttaaaatttgctagtggtttgaaaataataatgtactgactacatgtatgctgttattgtcagtgtttccttctataaactgttctttggaaaaattaagttatacataaaattcatattaaactttttacagaaagcatacatgataaacagtttatggtacttctcagaatcatttcataataagcaatttatttagcttaagttccaacttactgttcttattataaattgcaaagcaacctgtcttacattcttacattatcttaaaataaatatttctgcccttgaatcaagaaaca

SEQ ID NO: 48697 - DNA, 297 bp, Homo Sapiens
tggtggacgctggcctgggaatttctttgcacacgtagcactttctcccatgaacacccaaggaggtcatgcctgatctctctttctagagatcctggagagattgaaaaagaagagcaggccacagctggaaaagctgagacccaggaggaatttcagggtgaatggactgctccaactcctgagttcgctgctactgagcctgaggttgcagactggcctgaagttgcgcaggtgccctctgggcctattcagcaggtccccactgaagactggagcactcagcctgccgctgaa

SEQ ID NO: 48698 - DNA, 960 bp, Homo Sapiens
caggtgctccataatgagtcaaaagggagccccacctcggcttaccctgagcggaaggggagccccacgcctgggttttccactcgaagaggaagtccaactacaggatttatcgagcagaaggggagccccacctcagcctaccccgagcgcaggggtagtccggtgccccccgtgccggagcgcaggagcagtccggtgccccccgtgccggagcgcaggggcagcctcacccttaccatctccggggagtccccgaaggccgggcccgcggaggaggggccgagcggccccatggaagtcctgcgcaaaggctccttgcgtcttaggcagctgctgagccccaagggcgagcggcgcatggaggatgagggtggcttcccagtgccgcaggagaacggccaacccgagagcccgcggcgtctgtcactgggccagggtgacagcacggaggctgccacagaagagcggggtccgcgggcgcgcctgtcctcagccacggccaacgccttgtacagcagcaaccttcgggatgacacgaaggccattctggagcagatcagtgcccacggccagaagcaccgtgcggtccctgccccgagccccggcccgacccacaacagccccgagctaggccgtccaccggctgctggcgtcctggccccagatatgtccgacaaggacaagtgttcagccatcttccgctcggacagcttggggacccagggccggctgagccgcacgctgccagccagcgcggaggagcgcgatcggctgctgcgccgcatggagagcatgcgcaaggagaagcgcgtgtacagccgcttcgaggtcttctgcaagaaagaggaggccagcagccctggggcaggggaaggccccgcggaggagggcaccagggacagcaaggtgggcaagttcgtgcccaagatcctgggcacgttcaaaagcaagaagtga

SEQ ID NO: 48699 - DNA, 264 bp, Homo Sapiens
atgtgggtctctgattgcattatcaaggggaaggcaagactggaacgtccagtccacaggaagacctgcaccactgttgccttcacacaggttaactcagaagacaaaggagttttgatgaagctggtggaagctgtcaggactaattacaacgacagatatgatgatatccgtcgtcactggggaggcaatatcctgggtcccaaatctatggcttgcattgccaagttggaaaaggcaaaggttaaagaacttgccacttaa

SEQ ID NO: 48700 - DNA, 1753 bp, Homo Sapiens
agacgatccgctagccacattaggcgctcggtctctgcgtccgcccctcccgtgcctcagagacttgcgctccccaggcccgagcccctgtcggcccatcctcgagcccgtgtggctcgcgaacctctaactccagccgctgcagccccctcccaggcccggcgtccccgagccccgcgggcgccgcgcctgcccttctttggctacgctgcagccgcggtgtcggcgagtcctcccgggttgcccccgcgggcgtcagagggagggcgggcgcccgcgtggtgacggcgacgcctgcagcccaaggagcgctccactcgctgccgccggaggggccggtgacctcttggctaccccgcgtcggaggcttagatggctcaggcgaagatcaacgctaaagccaacgaggggcgcttctgccgctcctcctccatggctgaccgctccagccgcctgctggagagcctggaccagctggagctcagggttgaagctttgagagaagcagcaactgctgttgagcaagagaaagaaatccttctggaaatgatccacagtatccaaaatagccaggacatgaggcagatcagtgacggagaaagagaagaattaaatctgactgcaaaccgtttgatgggaagaactctcaccgttgaagtgtcagtagaaacaattagaaacccccagcagcaagaatccctaaagcatgccacaaggattattgatgaggtggtcaataagtttctggatgatttgggaaatgccaagagtcatttaatgtcgctctacagtgcatgttcatctgaggtgccacatgggccagttgatcagaagtttcaatccatagtaattggctgtgctcttgaagatcagaagaaaattaagagaagattagagactctgcttagaaatattgaaaactctgacaaggccatcaagctattagagcattctaaaggagctggttccaaaactctgcaacaaaatgctgaaagcagattcaattagtcttcaaacctaagagcatttacacaatacacaaggtgtaaaaatgataaaatactattttaattgataactagttctttgttaggtataaccacttagttgacactgatagttgtttcagatgaggaaaatattccatcaagtatcttcagttttgtgaataacaaaactagcaatattttaattatctatctagagattttttagattgaattcttgtcttgtactaggatctagcatatttcactattctgtggatgaatacatagtttgtggggaaaacaaacgttcagctaggggcaaaaagcatgactgctttttcctgtctggcatggaatcacgcagtcaccttgggcatttagtttactagaaattctttaccttaagcagcacacacatttactacacacacagtgttaacaaagcactgtgcttagagggtaaaaaggaatcacaaaacaagaatctttccaaagttgtctcattcagcaatgttaaggcatctgtatcaaattattttggatgtaaagattcctgtgtctcataatatgaatgtattttttgatatacaagaaactgacataaaatgtgagaaaaccacctataatttaccactgtgaacaattatatatctatctgcttcatcttttctcaaatgcatcaattctctaaaattcctatattgtaacttgcctttttttaaaaaagttagatgctgatataaagtctgcttaattgtcaactt

SEQ ID NO: 48701 - DNA, 1120 bp, Homo Sapiens
ggtttcagaaactgcctacttaatttgaaaagaacaatggtaggaaaggctagatcttccaattttaccttatccgaaaagcttgatttgctaaagcttgtgaagccatatgtgaaaattctcgaagaacacactaataaacattcagtaatagtagaaaagaatagatgttgggatatcatagcagttaactataatgcaattggagtagaccgccctcctcgaacagcacagggcctacgcaccctttataaaaggctcaaagaatatgccaaacaggagctattgcagcaaaaagagacccaatcagattttaaaagcaatatttctgagccaaccaagaaagttatggagatgattccccagatttccagtttttgcctggtaagagacaggaaccacatacaaagtgcaaacttggatgaggaggcacaggctggtaccagttcactacaggtaatgttggatcaccatcctgttgctattacagtggaggtgaagcaagaagaagacattaaaccacctcctccactggttttaaattctcaacagagtgatactttagagcaaagagaagaacatgaattagtacatgttatggaaagatccttgtcgccttcactttcctctgttgatatgagaatgacatcgtctccatcttctattccaaggagagatgatttttttcggcatgagagtggtgaacactttaggtcactattagggtatgatcctcagatcctgcaaatgttgaaagaggagcatcagataattttagaaaatcaaaaaaattttggattgtatgttcaggagaagagggatggattgaaaagaaggcagcagctagaggaagagctactaagagcaaaaattgaagtggagaagctgaaagcaattcgcttacggcatgatctacctgaatataacagtctctaagtttttttttcaatcttgcaatttgataattttgattttggccaaattactttaatttgggaatatcctgaaacagaatacacgttcttgaaaaatgttgttaatctctattatggaaaaactttttagatataattttctaattattttcttttgagatattaaaatttactggttggttggc

SEQ ID NO: 48702 - DNA, 1804 bp, Homo Sapiens
gaattccgaatcatgtgcagaatgctgaatcttcccccagccaggacgaataagacagcgcggaaaagcagattctcgtaattctggaattgcatgttgcaaggagtctcctggatcttcgcacccagcttcgggtagggagggagtccgggtcccgggctaggccagcccggcaggtggagagggtccccggcagccccgcgcgcccctggccatgtctttaatgccctgccccttcatgtggccttctgagggttcccagggctggccagggttgtttcccacccgcgcgcgcgctctcacccccagccaaacccacctggcagggctccctccagccgagaccttttgattcccggctcccgcgctcccgcctccgcgccagcccgggaggtggccctggacagccggacctcgcccggccccggctgggaccatggtgtttctctcgggaaatgcttccgacagctccaactgcacccaaccgccggcaccggtgaacatttccaaggccattctgctcggggtgatcttggggggcctcattcttttcggggtgctgggtaacatcctagtgatcctctccgtagcctgtcaccgacacctgcactcagtcacgcactactacatcgtcaacctggcggtggccgacctcctgctcacctccacggtgctgcccttctccgccatcttcgaggtcctaggctactgggccttcggcagggtcttctgcaacatctgggcggcagtggatgtgctgtgctgcaccgcgtccatcatgggcctctgcatcatctccatcgaccgctacatcggcgtgagctacccgctgcgctacccaaccatcgtcacccagaggaggggtctcatggctctgctctgcgtctgggcactctccctggtcatatccattggacccctgttcggctggaggcagccggcccccgaggacgagaccatctgccagatcaacgaggagccgggctacgtgctcttctcagcgctgggctccttctacctgcctctggccatcatcctggtcatgtactgccgcgtctacgtggtggccaagagggagagccggggcctcaagtctggcctcaagaccgacaagtcggactcggagcaagtgacgctccgcatccatcggaaaaacgccccggcaggaggcagcgggatggccagcgccaagaccaagacgcacttctcagtgaggctcctcaagttctcccgggagaagaaagcggccaaaacgctgggcatcgtggtcggctgcttcgtcctctgctggctgccttttttcttagtcatgcccattgggtctttcttccctgatttcaagccctctgaaacagtttttaaaatagtattttggctcggatatctaaacagctgcatcaaccccatcatatacccatgctccagccaagagttcaaaaaggcctttcagaatgtcttgagaatccagtgtctctgcagaaagcagtcttccaaacatgccctgggctacaccctgcacccgcccagccaggccgtggaagggcaacacaaggacatggtgcgcatccccgtgggatcaagagagaccttctacaggatctccaagacggatggcgtttgtgaatggaaatttttctcttccatgccccgtggatctgccaggattacagtgtccaaagaccaatcctcctgtaccacagcccggaggggaatggattgtagatatttcaccaagaattgcagagagcatatcaagcatgtgaattttatgatgccaccgtggagaaagggttcagaatgctga

SEQ ID NO: 48703 - DNA, 6595 bp, Homo Sapiens
atgaagcaggtgcccaacccactgcccaaggtgctgagccggcgcggggtcggcgctgggctggaggcggcggagcgcgagagcttcgagcggactcagactgtcagcatcaataaggccattaatacgcaggaagtggctgtaaaggaaaaacacgccagaaatatccttttggatagcccatccgttgttttccataaccccccctcaccgtgcatactgggcacccaccatgagaaaggggcacagaccttctggtctgttgtcaaccgcctgcctctgtctagcaacgcagtgctctgctggaagttctgccatgtgttccacaaactcctccgagatggacacccgaacgtcctgaaggactctctgagatacagaaatgaattgagtgacatgagcaggatgtggggccacctgagcgaggggtatggccagctgtgcagcatctacctgaaactgctaagaaccaagatggagtaccacaccaaaaatcccaggttcccaggcaacctgcagatgagtgaccgccagctggacgaggctggagaaagtgacgtgaacaactttttccagttaacagtggagatgtttgactacctggagtgtgaactcaacctcttccaaacagtattcaactccctggacatgtcccgctctgtgtccgtgacggcagcagggcagtgccgcctcgccccgctgatccaggtcatcttggactgcagccacctttatgactacactgtcaagcttctcttcaaactccactcctgcctcccagctgacaccctgcaaggccaccgggaccgcttcatggagcagtttacaaagttgaaagatctgttctaccgctccagcaacctgcagtacttcaagcggctcattcagatcccccagctgcctgagaacccacccaacttcctgcgagcctcagccctgtcagaacatatcagccctgtggtggtgatccctgcagaggcctcatcccccgacagcgagccagtcctagagaaggatgacctcatggacatggatgcctctcagcagaatttatttgacaacaagtttgatgacatctttggcagttcattcagcagtgatcccttcaatttcaacagtcaaaatggtgtgaacaaggatgagaaggaccacttaattgagcgactatacagagagatcagtggattgaaggcacagctagaaaacatgaagactgagagccagcgggttgtgctgcagctgaagggccacgtcagcgagctggaagcagatctggccgagcagcagcacctgcggcagcaggcggccgacgactgtgaattcctgcgggcagaactggacgagctcaggaggcagcgggaggacaccgagaaggctcagcggagcctgtctgagatagaaaggaaagctcaagccaatgaacagcgatatagcaagctaaaggagaagtacagcgagctggttcagaaccacgctgacctgctgcggaagaatgcagaggtgaccaaacaggtgtccatggccagacaagcccaggtagatttggaacgagagaaaaaagagctggaggattcgttggagcgcatcagtgaccagggccagcggaagactcaagaacagctggaagttctagagagcttgaagcaggaacttgccacaagccaacgggagcttcaggttctgcaaggcagcctggaaacttctgcccagtcagaagcaaactgggcagccgagttcgccgagctagagaaggagcgggacagcctggtgagtggcgcagctcatagggaggaggaattatctgctcttcggaaagaactgcaggacactcagctcaaactggccagcacagaggcaagatctatgtgccagcttgccaaagaccaacgaaaaatgcttctggtggggtccaggaaggctgcggagcaggtgatacaagacgccctgaaccagcttgaagaacctcctctcatcagctgcgctgggtctgcagatcacctcctctccacggtcacatccatttccagctgcatcgagcaactggagaaaagctggagccagtatctggcctgcccagaagacatcagtggacttctccattccataaccctgctggcccacttgaccagcgacgccattgctcatggtgccaccacctgcctcagagccccacctgagcctgccgactcactgaccgaggcctgtaagcagtatggcagggaaaccctcgcctacctggcctccctggaggaagagggaagccttgagaatgccgacagcacagccatgaggaactgcctgagcaagatcaaggccatcggcgaggagctcctgcccaggggactggacatcaagcaggaggagctgggggacctggtggacaaggagatggcggccacttcagctgctattgaaactgccacggccagaatagaggagatgctcagcaaatcccgagcaggagacacaggagtcaaattggaggtgaatgaaaggatccttggttgctgtaccagcctcatgcaagctattcaggtgctcatcgtggcctctaaggacctccagagagagattgtggagagcggcaggggtacagcatcccctaaagagttttatgccaagaactctcgatggacagaaggacttatctcagcctccaaggctgtgggctggggagccactgtcatggtggatgcagctgatctggtggtacaaggcagagggaaatttgaggagctaatggtgtgttctcatgaaattgctgctagcacagcccagcttgtggctgcatccaaggtgaaagctgataaggacagccccaacctagcccagctgcagcaggcctctcggggagtgaaccaggccactgccggcgttgtggcctcaaccatttccggcaaatcacagatcgaagagacagacaacatggacttctcaagcatgacgctgacacagatcaaacgccaagagatggattctcaggttagggtgctagagctagaaaatgaattgcagaaggagcgtcaaaaactgggagagcttcggaaaaagcactacgagcttgctggtgttgctgagggctgggaagaaggaacagaggcatctccacctacactgcaagaagtggtaaccgaaaaagaatagagccaaaccaacaccccatatgtcagtgtaaatccttgttacctatctcgtgtgtgttatttccccagccacaggccaaatccttggagtcccaggggcagccacaccactgccattacccagtgccgaggacatgcatgacacttccaaagactccctccatagcgacaccctttctgtttggacccatggtcatctctgttcttttcccgcctccctagttagcatccaggctggccagtgctgcccatgagcaagcctaggtacgaagaggggtggtggggggcagggccactcaacagagaggaccaacatccagtcctgctgactatttgacccccacaacaatgggtatccttaatagaggagctgcttgttgtttgttgacagcttggaaagggaagatcttatgccttttcttttctgttttcttctcagtcttttcagtttcatcatttgcacaaacttgtgagcatcagagggctgatggattccaaaccaggacactaccctgagatctgcacagtcagaaggacggcaggagtgtcctggctgtgaatgccaaagccattctccccctctttgggcagtgccatggatttccactgcttcttatggtggttggttgggttttttggttttgtttttttttttaagtttcactcacatagccaactctcccaaagggcacacccctggggctgagtctccagggccccccaactgtggtagctccagcgatggtgctgcccaggcctctcggtgctccatctccgcctccacactgaccaagtgctggcccacccagtccatgctccagggtcaggcggagctgctgagtgacagctttcctcaaaaagcagaaggagagtgagtgcctttccctcctaaagctgaatcccggcggaaagcctctgtccgcctttacaagggagaagacaacagaaagagggacaagagggttcacacagcccagttcccgtgacgaggctcaaaaacttgatcacatgcttgaatggagctggtgagatcaacaacactacttccctgccggaatgaactgtccgtgaatggtctctgtcaagcgggccgtctcccttggcccagagacggagtgtgggagtgattcccaactcctttctgcagacgtctgccttggcatcctcttgaataggaagatcgttccaccttctacgcaattgacaaacccggaagatcagatgcaattgctcccatcagggaagaaccctatacttggtttgctacccttagtatttattactaacctcccttaagcagcaacagcctacaaagagatgcttggagcaatcagaacttcaggtgtgactctagcaaggctcatctttctgcccggctacatcagccttcaagaatcagaagaaaggccaaggtgctggactgttactgacttggatcccaaagcaaggagatcatttggagctcttgggtcagagaaaatgagaaaggacagagccagcggctccaactcctttcagccacatgccccaggctctcgctgccctgtggacaggatgaggacagagggcacatgaacagcttgccagggatgggcagcccaacagcacttttcctcttctagatggaccccagcatttaagtgaccttctgatcttggaaaaacagcgtcttccttctttatctatagcaactcattggtggtagccatcaagcacttcccaggatctgctccaacagaatattgctaggttttgctacatgacgggttgtgagacttctgtttgatcactgtgaaccaacccccatctccctagcccacccccctccccaactccctctctgtgcattttctaagtgggacattcaaaaaactctctcccaggacctcggatgaccatactcagacgtgtgacctccatactgggctaaggaagtatcagcactagaaattgggcagtcttaatgttgaatgctgctttctgcttagtatttttttgattcaaggctcagaaggaatggtgcgtggcttccctgtcccagttgtggcaactaaaccaatcggtgtgttcttgatgcgggtcaacatttccaaaagtggctagtcctcacttctagatctcagccattctaactcatatgttcccaattaccaaggggtggccgggcacagtggctcacgcctgtaatcccagcactttgagaggctgaggtggtaggatcacctgaggtcaggagttcaagaccagcctgtccaacatggtgaaacccccatctctactaaaaataccaaaaattagccgagcgtagtgacgggtgcccgtaatcccagctactcaggaggctgagacaggagaatcacctgaaccccagaggcagaggttgcagtgagctgagatcacgccattgtactccagcctgggcaacaagagcaaaactccgtctcaaaaaaaaaaaaaaattacaaatggggcaaacagtctagtgtaatggatcaaattaagattctctgcccagccgggcacagtggcgcatgcctgtaatcccagaactttgggaggccaagacgggatgattgcttgagctcaggagtttgagaccaggctgggcatcatagcaagacctcatctctactaaaattcaaaaacaaaattagccgggcatgatggtgcatgcctgtagtctcagctagttggggagctaaggtgggagaattgcttgagcttgggaagtcgaggctgcagtcagccctgattgtgccagtgcactccggcctgggtgacagagtgagaccctgtctcaaaaaaaaaaagattctgtgtcagagcccagcccaggagtttgaggctgcaatgagccatgatttcccactgcactccagcctgagtgacagagcgagactccatctctttaaaaacaaacaaaaaattatctgaatgatcctgtctctaaaaagaagccacagaaatgtttaaaaacttcatcgacttagcctgagtcataacggttaagaaagcacttaaacagaagcagaggctaattcagtgtcacatgaggaagtagctgtcagatgtcacataattactttcgtaatagctcagattagaatggctaccccattctctagacaaaatcaaattgtcctattgtgactcttctaaaaatgaagatgaagagctatttaatgacacaccttggattaaaacgggaatcacatcttaaagctaaaaatgaacctgcaagccttctaaatgagtcactgagcatcactagtgacaagtctcgggtgagcgtaaatgggtcatgacaagatgggacagcaacaaaatcatggcttaggatcgacaagaagttaaaaaacagctgcatctgttacttaagtttgtaagacagtgccctgagacctctagagaaaagatgtttgtttacataagagaaagaggccagacatggt

SEQ ID NO: 48704 - DNA, 4116 bp, Homo Sapiens
atggagaatatggcggaggaggagctgctgcccctggagaaggaggaggtggaggtggcccaggtccaggtcccgaccccggcccgggactcggctggggtcccagctccggccccggattcggctctggactcggctccgactccggcctcggctccagccccagcccctgccctggcccaggctccggccctgtccccgtccctagcctctgcccctgaggaggctaaaagcaagagacacatctcaattcaaaggcagcttgctgatctagagaatttagcttttgtaactgatggaaattttgactctgccagctcattgaactcagataatcttgatgcaggcaacagacaggcttgtccattgtgccctaaggaaaaattcagagcttgtaatagccataagcttcgtcgtcacctccagaatttacactggaaagtctcagttgaatttgaaggttacaggatgtgcatctgtcacttaccttgtcgaccagtgaaaccaaacattattggagaacagataaccagtaaaatgggagcccattatcattgtatcatttgttcagcaacaatcaccagaagaactgatatgctaggacatgttaggcgccacatgaataaaggagagactaaatctagttatattgcagcttccactgctaaaccacctaaggaaattttgaaagaggcagacacggatgtacaagtttgtcccaactattctatacctcagaaaacagattcctattttaaccccaaaatgaaactaaatcggcagctaatattctgtacattggctgctttggctgaggaacgaaaacctttggaatgtctagatgcttttggagccactgggataatgggattacagtgggcaaaacatcttggaaatgcagtcaaagttacaatcaatgacttgaatgaaaattctgtgacactgattcaggaaaactgccatttaaacaaattgaaagtggtggtggacagtaaggaaaaggaaaagagtgatgatattcttgaagaaggagagaaaaatcttggtaatattaaggtgaccaaaatggatgccaatgtactgatgcatttgagatcttttgatttcatacatctagacccttttggaacatcagtgaattatctagattctgcattcagaaatataagaaaccttggcatagtgtcagtgacttctacagatatcagttctttatatgccaaggcacagcatgttgcccggcgtcactacggatgtaacattgtccgaactgaatattacaaggaactagcagccagaattgttgtagctgcagtggcaagagctgcagcccgatgcaacaaaggcatagaagtactgtttgcagtggctctggaacattttgtgttggtagttgtgagagttttgaggggacctacttcagcagatgaaacagccaagaagattcaatacctgatccattgtcagtggtgtgaagagagaatttttcagaaggatggtaatatggtagaagaaaacccatatagacagctgccttgtaactgtcatggaagcatgcctggaaagacagcaatagaacttggacctctgtggtcaagttcccttttcaatactggattcctcaaaagaatgctatttgaatctcttcaccatggtttggatgacattcagaccctaataaagacattaatctttgaatcagagtgtacgcctcaaagtcagttttcaattcatgcatcttcaaatgtcaacaagcaagaagaaaatggtgtatttattaaaactacagatgacaccacaacagataattacattgcacaaggaaagagaaaaagtaatgaaatgatcacaaatttaggcaagaagcaaaagactgatgtcagtactgaacatcctcccttttattacaacattcacagacacagcattaaaggaatgaatatgccaaagttaaaaaagtttttgtgctatttatctcaagcaggctttcgagtaagccgaactcattttgacccaatgggtgtacgcacagatgcacctctgatgcagtttaaatctatccttttaaagtacagcacccccacctacactggaggacagtcagaaagccatgtccagtcagcatctgaagatacagtaactgaaagagttgaaatgtcagtgaatgacaaagcagaagcaagtggctgcagaagatggtaaacgtagagaagaattggttctcaggtgtctgtatagatggcctaatagttctctataccaactgtagttctttttctgttctttcaattcagtagagtaaaaataaaaaacagtgtcattttcattcagaaactgagcagtttctaacttagctggtttgggagctttgctttccaagtttttttttgttttaaggcaaacttaaaattttaatggaaacatttcatatgaagccaagtctcactgagatcaccctactgcttaataattcagaaaattttcacatgcaaagtgtttggaattttatgtatgttatgaaagccatcttttacaattcttaatcacatctctgcctaaactgattcatgatgtttatgttttcctgtttgtagtgtacaaaatgaagctgaaggctcacatgttaaaatgaccctgaatagaataggaagaacaatgttcttacaggtcataatgtatttcacaattaaaaaactaaaatatgtacccatttttaagaaatcatacttctctccacattgatcttttcatttcttactagcttttaagaaattaaatacttgcctgagatagaaatactttatttttgtaactttaaggtctaaatgactaaacttcaaagtaagattttgtcagaataaattgagaccattaatctaatataatacttgttcatgagcactgaaatcctgaagaggagagatttggttataaattaaaaaggttgggtgatcttaagtgcctcagttaatgcacgtacagtattcatttggttggttgtactacctctcagaagtaaaatttgtcaccttatggaatgagagtttttgggtttgggggttgtttttttgttgttgcttggtttggtatttttggttttgtgtgtatttgtataaattttctgtataattagcccaggctgatgtaactataaaaattagttgaaaaaaaaaatattgtttccttaatggaattctcacttcatttgaatataagattttggatgaaaggatttggtataaagtttgggtttttgtctcaaggatttgatccatatttatccctaaatatttcttaagggatgtaactttttataaccattaagtggggggaagggggtggagggggtggtaataattataactgaaaggtttaaatatactacctaagaaaaaagtacttctgtgacatatacaaaaaaatctagtggataggcattagatgaatagagaatattaattttgcagaaatgaaggaaaatctcttcgtgctagtacagcgtattcccaagagagtttattttcctttctccaattaatgtggtcataaatttcggtaaaatcaagaaataggtgaagtgcaagctagtttctataatgaccattaaaaaaattctgctgtgtaattcttgccagttaaaattataacttgcaaatgagcagaataaatgaggtttttttcaattaaaaattactataaatccaggaggcaaactattttagcactcagattatctgatttaatacatattattgaatatcagtctcaaattttgctaaatgcttatcagcatgaaatatgttgatcagtgatgagttgggcttaatgcaaagatcctaatttaataaagaaacctgtaaattactgttacctaaaatatatgtgtatattaatttcacatataaaggtagatttttcaaagaaaaatttggtaggcggtagtttagaactctgatcaggtactacatcaaccaaaagaggaaatactttaaaaattccttttagcaacctgagcaatcttattctcgtaacaatagtagtaatttgggacattgcaaatgtttatcatgttgtaaagtagcatcagttgtatcctttcattaaaacttgataaac

SEQ ID NO: 48705 - DNA, 556 bp, Homo Sapiens
aggtccctggatggccggttgcaggtgtcccatcggaaggggctccctcatgtcatctactgccgcctgtggcgatggccagacctgcacagccaccacgagctacgggccatggagctgtgtgagttcgccttcaatatgaagaaggacgaggtctgcgtgaatccctaccactaccagagagtagagacaccagttctacctcctgtgttggtgccacgccacacagagatcccggccgagttccccccactggacgactacagccattccatccccgaaaacactaacttccccgcaggcatcgagccccagagcaatattccaggtaggcacgtgggcggcacaggctggcctgggaggcaggggcagcggtcagccccgacatcagtcctgtggccccaatctctgccccctggccgtcccccgctcaccccctctgcgcacagctctggcctgagggcccctgactcagaaccgcatccctgttgggagaggacccatgacctcagctcccccctcactagtgatgcttttcttggcatagaggagcagc

SEQ ID NO: 48706 - DNA, 1413 bp, Homo Sapiens
atggaggagtttgtggggctgcgtgaaggctcctcagggaaccctgtgactctgcaggagctgtggggcccctgtccccgcatccgccgaggcatccgaggtggcctggagtggctgaagcagaagctcttccgcctgggcgaggactggtacttcctgatgaccctcggggtgctcatggccctggtcagctgtgccatggacttggctgttgagagtgtggtccgagcgcaccagtggctgtacagggagattggggacagccacctgctccggtatctctcctggactgtgtaccctgtggccctcgtctctttctcttcaggcttctctcagagcatcacaccctcctctggaggttctggaatcccggaggtgaagaccatgttggcgggtgtggtcttggaggactacctggatatcaagaactttggggccaaagtggtgggcctctcctgcaccctggcctgtggcagcaccctcttcctcgggaaagtggtatgggcagggggccctttcgtgcacctgtctgtgatgatggctgcctacctgggccgtgtgcgcaccacgaccatcggggagcctgagagcccacccatcccccacagcaagcctgtgtactccgctctggccaccttggttctcgcctccatcacctacccacccagcgccggccgcttcctagcttctcggctgtccatgaagcagcatctggactcgctgttcgacaaccactcctgggcgctgatgacccagaactccagcccaccctggcccgaggagctcgacccccagcacctgtggtgggaatggtaccacccgcggttcaccatctttgggacccttgccttcttcctggttatgaagttctggatgctgattctggccaccaccatccccatgcctgccgggtacttcatgcccatctttgtctatggagctgctatcgggcgcctctttggggagactctctcttttatcttccctgagggcatcgtggctggagggatcaccaatcccatcatgccaggggggtatgctctggcaggggctgcagccttctcaggggctgtgacccacaccatctccacggcgctgctggccttcgaggtgaccggccagatagtgcatgcactgcccgtgctgatggcggtgctggcagccaacgccattgcacagagctgccagccctccttctatgatggcaccgtcattgtcaagaagctgccatacctgccacggattctgggccgcaacatcggttcccaccgcgtgagggtggagcacttcatgaaccacagcatcaccacactggccaaggacatgccactggaggagattggagtacactgtcaccaagggcaggcacagatgccttctggggttgtctggttcccagtgagaggctcctga

SEQ ID NO: 48707 - DNA, 915 bp, Homo Sapiens
atgatgtttggtggctatgagactatagaagcatatgaagatgatctttatagggacgagttatctagtgaactgagtgttgatagtgaggtggaatttcaactctatagccgaatttattatgcccaagatcttgatgatgtcatcagggaggaagaacatgaaaaaaagaactctgggaatttggaatcttcgagtagtaaaccaaatcagaagaagctaattgtcctttcagatagtgaggtcatccagctgtcagatgggtcagaggtcatcacttctgatgaagatagtatttatagatgtaaaggaaagaatgttagagctcaagcacaagaaaatacccatggtccttctgcttttcttcaatctaatgagctgtttgataagaaatgcaagagtgatattgaagagagatcaggtgtaatccaagaggccatgattatagaggtcagttcaagtgcagaggaagagagcaccatttcagaaggcaataatgtggaaagctggatgctactgggatgtgaaatagatgataaagataatgatatccttctcaaccttctgggatgtgaaaactctgttactgaaggagaagatggtataaactggttcatcagtgacaaagacattgaggcccagatagctaataaccaactggaagatggacccagcgatattattcagccaatgaaaacattatctgtagaaattgtgacaaacacggccatttatcaaaaaactgtcccttaccatgaaaagttcgttgctgcttcctgtgctcctggagaggacacctcctgtattcctgtccagcccccctttgcaaatactgtcctgtgcctaagatgttggaccactcatgtcttttcagacattcttgggataaacagtgtgaccaatgtcatatgctag

SEQ ID NO: 48708 - DNA, 201 bp, Homo Sapiens
gtcacctgcatgaaggatctgattcatgagatctgtattgttaaaaaacaaaaacacttcaaagaagcaaataacttcccagggctattcaaattatcttcccaacgaggtggaatgaagaagacgaccactcattttgtagaaagtagagatactagtaacagggaagaccagattaacaggctcattagaaggatgaac

SEQ ID NO: 48709 - DNA, 1331 bp, Homo Sapiens
cagagatgctgccgctgctgctgccgctgcccctgctgtgggcagggccctcgctcaggatgcaagattccggctggagatgccagagtccgtgacggtgcaggagggtctgtgcatctttgtgcactgttcggtcttctacctcgagtatggctggaaagattctacccctgcttatggccactggttccgggaaggggtcagtgtagaccaggagactccgccacaaacaactcaactcaaaaagtgcagaaggagacccagggccgattccacctcctcggtgatccctcaaggaacaactgctccctgagcatcagagacgccaggaggagggacaacggttcatacttcttttgggtggcgagaggaagaacaaaatttagttacaaatattccccgctctctgtgtatgtgacagccctgacccacaggcccgacatcctcatcccggagttcctaaagtctggccatcccagcaacctgacctgctctgtgccctgggtctgtgagcagggaacaccccccatcttctcctggatgtcagctgcccccacctccctgggccccaggaccctccactcctcagtgctcacgatcatcccacggcctcaggaccacggcaccaacctcatctgtcaggtgacgttccccggagctggtgtgaccacggagagaaccatccagctcagtgtctcctggaaatcaggaaccgtggaagaggtggttgttttggccgtgggggtagtggctgtgaagatcctgcttctctgcctttgcctcatcatcctcagtttccacaagaagaaggcggtgagggcagtggaggttgaggagaatgtatatgctgtcatgggttaatctctcaggcctccagactgtacttccagatgtctcctcatccagttcctccacagtctgaatggccatgtttcctcttcattgctggagaatgaagtgcaaatgccactgcctggactgaaggcctttcacgatctgtcttctgctggactctgctcctgatcccccttctccttgcatcacccgaagtctccctacacccaccaggccaagccctctgtgattctgagactttgcatgtgtagttacttctcctgaaatggccttcctccccattcctgccaatccaggtccttatcatccttcaggttgtcttaaatgtcatccaggtgtgtgtatttttatgtaatccttgtatgatattaagcggagatgtggcatttgttcattaatttgtagacatattcagtaaccatactgaatacatataatgactatgtgccagcatttccgtatgtgcagaagttcat

SEQ ID NO: 48710 - DNA, 897 bp, Homo Sapiens
atgtcagatgcaaatttggatagcagcaagaagaatttcttggagggggaagtagatgatgaggaaagtgtgattttgacactggtgccagttaaagatgacgcaaatatggaacaaatggaaccaagcgtttcttcaacttctgatgtcaaactggagaagcctaagaaatacaatccaggtcatctacttcaaacaaatgagcaatttacagctccacaaaaagctagatgcaaaataccagcccttcccttgccgaccattttgcctcccattaataaggtgtgtcgggacactttgcgggactggtgtcaacaactcggtttgagtactaatggcaagaaaatcgaagtttatctgaggcttcataggcatgcttaccctgaacaacggcaagatatgcctgaaatgtcacaagagaccagattacagcgatgttcgaggaaacgcaaggcagtgaccaagagagcaaggcttcagagaagttatgagatgaatgagagagcagaagagaccaatacagttgaagtgataacttcagcaccgggagccatgttggcatcatgggcaagaattgctgcaagagctgttcagcctaaggctttgaattcatgttccattcctgtttctgttgaggcctttttgatgcaagcctctggcgtcaggtggtgtgtggtccatggcagacttctctcggcagacacaaagggttgggtacgcctgcagtttcatgcaggtcaggcctgggtgcctaccactcacaggaggatgatttctctcttcttgttacctgcctgcattttcccatccccaggcatagaagataatatgttatgccccgactgtgctaagaggaataagaagatgatgaaaagattaatgacagtagagaagtag

SEQ ID NO: 48711 - DNA, 147 bp, Homo Sapiens
atggctaaaggtgacaccaagaaaccaaagggaaagatgtctgcttatgccttctttgtgcagatgtgcagagaagaacataagaagaaaaacccagaggtccttgtcaattttgcagaatattccaggaagtgctccgagaggtag

SEQ ID NO: 48712 - DNA, 570 bp, Homo Sapiens
ataagagatttactgtccagaaccaaaaaacctggtgggcttagaataagggaagatcaacagctgggattttacgtggaaggcctgaagtcggtgccctgtgagaactatgcccaaattgaaaggctgatggaacaaggaacaaaaataaggaccacagcttccaccaacatgaatgccagcagcagccggtctcacttggtcatcaccatccagttcaagcaggtgagagctgagtggatgccactagatctcaccaaacaatccagtattaatttggtggacctggcaagaagtgagaggcagaaatcttcaggatctgaaggagacagactgagggaaggatcgtgcgttaacttaagtttaaccaatttgggaagtgttatcagtgttctggctgacgcagctatggggaagaaggtcttgcacattccatacagagattctgttctgaccaaactgctccagtcagctctgggtgggaacagcagaaccgctttgatcgcagccgtaagtccagctgacatctgctatgaggaaactctatcaacattgagatatgcggaaagg

SEQ ID NO: 48713 - DNA, 1368 bp, Homo Sapiens
atggtggattttccaggctacaatctgtctggtgcagtcgcctccttcctattcatcctgctgacaatgaagcagtcagaagactttagagtcattggccctgctcatcctatcctggccggggttggggaagatgccctgttaacctgccagctactccccaagaggaccacaatgcacgtggaggtgaggtggtaccgctcagagcccagcacacctgtgtttgtgcacagggatggagtggaggtgactgagatgcagatggaggagtacagaggctgggtagagtggatagagaatggcattgcaaagggaaatgtggcactgaagatacacaacatccagccctccgacaatggacaatactggtgccatttccaggatgggaactactgtggagaaacaagcttgctgctcaaagtagcaggtctggggtctgcccctagcatccacatggagggacctggggagagtggagtccagcttgtgtgcactgcaaggggctggttcccagagccccaggtgtattgggaagacatccggggagagaagctgctggccgtgtctgagcatcgcatccaagataaagatggcctgttctatgcggaagccaccctggtggtcaggaacgcctctgcagagtctgtgtcctgcttggtccacaaccccgtcctcactgaggagaaggggtcggtcatcagcctcccagagaaactccagactgagctggcttctttaaaagtgaatggaccttcccagcccatcctcgtcagagtgggagaagatatacagctaacctgttacctgtcccccaaggcgaatgcacagagcatggaggtgaggtgggaccgatcccaccgttaccctgctgtgcatgtgtatatggatggggaccatgtggctggagagcagatggcagagtacagagggaggactgtactggtgagtgacgccattgacgagggcagactgaccctgcagatactcagtgccagaccttcggacgacgggcagtaccgctgcctttttgaaaaagatgatgtctaccaggaggccagtttggatctgaaggtggtaagtctgggttcttccccactgatcactgtggaggggcaagaagatggagaaatgcagccgatgtgctcttcagatgggtggttcccacagccccacgtgccatggagggacatggaaggaaagacgataccatcatcttcccaggccctgactcaaggcagccacgggctgttccacgtgcagacattgctaagggtcacaaacatctccgctgtggacgtcacttgttccatcagcatcccctttttgggcgaggagaaaatcgcaactttttctctctcaggttggtga

SEQ ID NO: 48714 - DNA, 2711 bp, Homo Sapiens
atggggtgcggacttagaaagctagaagaccctgatgatagcagccctggaaaaatattttctaccctgaagagaccgcaagtggaaacaaagacagaatttgcttacgaatatgtattgctggattttactctacaagcttcatcaaacccagaagtcatcaagataaattcaattctggatatagtaacaaaagtggaaaactattatcttaaaggatatattgtcggggctattcatcctgttatacaacctgtggggcagcgaaaacacctacctgcaagttacctatacagagtggtgctattgcgcttgaaattaagcccaaagaattcggcagcacccagtggacaaagacgcccaaggctcgtgattgaggaatgtcccctaacttctgaggcacaaacaaatgacgcagcaaaagaactgatagaaaagattaatgtcgctgctaaaagaggaatgaaatttgttggattcatatcacagcattattctccatctaaattctgcaatggaaccaaccatgatggagatatagaatcgatgctacatgtgagacacggttcagatgaaaactgtagaagttggaatgaagggacgttaagtgggcagtcatctgaaagcggaattgaggaagaacttcatcatgaaagtggacagtatcaaatggaacaaaatggcagccctacttcctctaaatcaagaaagggagaagcctcagataacaaattgtatacagtcttcaatgcttttgatgatgattcaacctcctgggcctatcaggaaggcatcctgtcaatgaaagtaacaagaaaaggatcagtcattagtacacttgatgctgattggctggagttaactaccttttattataaacaaggcttgtctttaattgattcttttgtattctgggaaacatctaaaggggaacatttgcctaaatctttggaaggattttttatctatgaagaagaaggttctggagttccaggttctagtaggaaaggaaatgatgccatcgtagtagaacaatggactgttattgagggatgtgaaatcaaaacagattatggccctctgctgcacactctggctgaattcggatggcttctgacaagcgtgttgcccacacctgtattgagacatgacagtgaagggaatttggctacaaagcagatcgtattccttcagaggccagttatgtggaattcagctgctcaaacaccagataagaaagccagccgccacataaaaggtgaagacaagaataaagccactagtagaagcatcggattagacacaacctcgtcacaacctgcagagagcagacacctgcctgaggagtgccgcctttctccctcccgggaatgctggacaaaggagggaaggctggcacagcacaacagcttctctgggttcagcagcagtgacaacgtcctccgggaattagacgacggacagtttgatcaggaagatggagtgactcaggtcacttgtatgtgagccatgaggtgaagcaaaggaaggccctgtaaataattgttaaaatcattgccaactgaccttattgtattactttctctgcatttatgtaatatttttgaatttttccagacccagcctttcctctaatctatgtaaactttggcacaacctcccagacaaggaagaataaccaacatatttatacatttagaatcatgtttacacttctctcaactaaaacatctggttaaacagatgttccattcggttattacacaataatctatttcagcttctcatgaatgtacaaagtagactttcttacaattcctggtaaggagactgaatatctcaatcagtattttacccaattagagagagttctcaggaagttacagtcttatttaagctgaaaaataacctctctctctctttttttttctctctctctcatacacacacacagctaattagtgcaaataaatatctatttcccaaatataataattaatccacattttgtctttaactatagcatgtatatacaaagcaagcccctatgtgttaaaatattttttgaaaaaaatcttttttatgtatctttgcttttaaagggtcatgtcaccaaccctgtactgattcattgtacataaatgttgttgctcctaaaagcctaaaaatgcagacagcaaagcagcatctcttaaaattcaatatgaaaagaacccataatctcaatacataaataccttagtagagagtaagatttaatttttttttattttaaagtccaaatactatgaagaggaaaaatatcaacttcaatttgaaactgaagtcttttacatctgtctagatttgaattctgcttttattttgacttgttaaatcctgaagaatgttgaaacctagaattttcaatctggcaggagtagaaagatgctcatagcacacgcgatatgtatgataacatattttgtttcatcttgcttttctttccccttctaatagaggtggctttgccttgacccagcctttaacaatctttaaaattctacaaaataaaggattttcatttatctatgaaaggcttactttgaaagatggaacctccaagtgaattacaacttattctatcattgatgaattcagcctattatatatttttattaacattgatgttgacattgtaagatcattttaataataaaacatcattttta
